(19) United States
(12) Patent Application Publication
(10) Pub. No.: US 2024/0287519 A1
(43) Pub. Date: Aug. 29, 2024

(54) TREATMENT OF DKK2 RELATED DISEASES AND DISORDERS

(71) Applicant: Empirico Inc., San Diego, CA (US)

(72) Inventors: Omri GOTTESMAN, San Diego, CA (US); Shannon BRUSE, San Diego, CA (US); Paul BUSKE, Madison, WI (US); Brian CAJES, San Diego, CA (US); David JAKUBOSKY, San Diego, CA (US); Sarah KLEINSTEIN, San Diego, CA (US); David LEWIS, Madison, WI (US); David ROZEMA, Cross Plains, WI (US); John VEKICH, San Diego, CA (US)

(21) Appl. No.: 18/569,113

(22) PCT Filed: Jun. 17, 2022
(86) PCT No.: PCT/US2022/033995

§ 371 Date: Dec. 11, 2023

Related U.S. Application Data
(60) Provisional application No. 63/213,054, filed on Jun. 21, 2021.

(51) Int. Cl. C12N 15/113; A61P 17/14

(52) U.S. Cl. CPC C12N 15/113; A61P 17/14; C12N 2310/14; C12N 2310/315; C12N 2310/321; C12N 2310/322; C12N 2310/3231; C12N 2310/3515

(57) ABSTRACT

Disclosed herein are compositions comprising an oligonucleotide that targets DKK2. The oligonucleotide may include a small interfering RNA (siRNA) or an antisense oligonucleotide (ASO). Also provided herein are methods of decreasing DKK2 expression by providing an oligonucleotide that targets DKK2 to a subject in need thereof. Some embodiments include methods of treating hair loss by providing the oligonucleotide.

### CROSS-REFERENCE

[0001] This application claims the benefit of U.S. Provisional Application No. 63/213,054 filed Jun. 21, 2021, which is incorporated by reference herein in its entirety

### BACKGROUND OF THE INVENTION

[0002] Alopecia (hair loss) is ever abundant, and affects many people. Improved therapeutics are needed for treating hair loss.

### SUMMARY OF THE INVENTION

[0003] Described herein are compositions comprising an oligonucleotide that targets dickkopf WNT signaling pathway inhibitor 2 (DKK2) and when administered to a subject in an effective amount reduces a DKK2 mRNA or protein level. Described herein, in some embodiments, are compositions comprising an oligonucleotide that targets DKK2 and when administered to a subject in an effective amount increases a hair count in the subject. In some embodiments, the hair count is increased by about 10% or more, as compared to prior to administration. In some embodiments, the hair count includes a vellus hair count, a non-vellus hair count, or a total hair count. Described herein, in some embodiments, are compositions comprising an oligonucleotide that targets DKK2 and when administered to a subject in an effective amount increases a hair thickness measurement in the subject. In some embodiments, the hair thickness measurement is increased by about 10% or more, as compared to prior to administration. Described herein, in some embodiments, are compositions comprising an oligonucleotide that targets DKK2 and when administered to a subject in an effective amount increases a hair density measurement in the subject. In some embodiments, the hair density measurement is increased by about 10% or more, as compared to prior to administration. Described herein, in some embodiments, are compositions comprising an oligonucleotide that targets DKK2 and when administered to a subject in an effective amount increases a number of hair follicles in the subject. In some embodiments, the number of hair follicles is increased by about 10% or more, as compared to prior to administration. In some embodiments, the number of hair follicles includes a number of terminal hair follicles, a number of anagen hair follicles, a number of telogen hair follicles, a number of catagen hair follicles, a number of vellus-like miniaturized hair follicles, a number of indeterminate hair follicles, or a total number of hair follicles. Described herein, in some embodiments, are compositions comprising an oligonucleotide that targets DKK2 and when administered to a subject in an effective amount changes a hair loss assessment score in the subject. In some embodiments, the hair loss assessment score is changed by about 10% or more, as compared to prior to administration. Described herein, in some embodiments, are compositions comprising an oligonucleotide that targets DKK2 and when administered to a subject in an effective amount changes a protein or mRNA level of β-catenin, α-SMA, collagen I, or collagen III, in the subject. In some embodiments, the protein or mRNA level of β-catenin, α-SMA, collagen I, or collagen III is changed by about 10% or more, as compared to prior to administration. Described herein, in some embodiments, is a composition comprising an oligonucleotide that targets DKK2 and when administered to the skin of a subject in an effective amount decreases a level of DKK2 mRNA or DKK2 protein. In some embodiments, the skin comprises scalp skin. In some embodiments, the level of DKK2 mRNA or DKK2 protein decreased by about 10% or more, as compared to prior to administration. In some embodiments, the oligonucleotide comprises a modified internucleoside linkage. In some embodiments, the modified internucleoside linkage comprises alkylphosphonate, phosphorothioate, methylphosphonate, phosphorodithioate, alkylphosphonothioate, phosphoramidate, carbamate, carbonate, phosphate triester, acetamidate, or carboxymethyl ester, or a combination thereof. In some embodiments, the modified internucleoside linkage comprises one or more phosphorothioate linkages. In some embodiments, the oligonucleotide comprises 1, 2, 3, 4, 5, 6, 7, 8, 9, 10, 11, 12, 13, 14, 15, 16, 17, 18, 19, or 20 modified internucleoside linkages. In some embodiments, the oligonucleotide comprises 2 or more modified internucleoside linkages, 3 or more modified internucleoside linkages, 4 or more modified internucleoside linkages, 5 or more modified internucleoside linkages, 6 or more modified internucleoside linkages, 7 or more modified internucleoside linkages, 8 or more modified internucleoside linkages, 9 or more modified internucleoside linkages, 10 or more modified internucleoside linkages, 11 or more modified internucleoside linkages, 12 or more modified internucleoside linkages, 13 or more modified internucleoside linkages, 14 or more modified internucleoside linkages, 15 or more modified internucleoside linkages, 16 or more modified internucleoside linkages, 17 or more modified internucleoside linkages, 18 or more modified internucleoside linkages, 19 or more modified internucleoside linkages, or 20 or more modified internucleoside linkages. In some embodiments, the oligonucleotide comprises a modified nucleoside. In some embodiments, the modified nucleoside comprises a locked nucleic acid (LNA), hexitol nucleic acid (HLA), cyclohexene nucleic acid (CeNA), 2′-methoxyethyl, 2′-O-alkyl, 2′-O-allyl, 2′-O-allyl, 2′-fluoro, or 2′-deoxy, or a combination thereof. In some embodiments, the modified nucleoside comprises a LNA. In some embodiments, the modified nucleoside comprises a 2′,4′ constrained ethyl nucleic acid. In some embodiments, the modified nucleoside comprises a 2′-O-methyl nucleoside, 2′-deoxyfluoro nucleoside, 2′-O—N-methylacetamido (2′-O-NMA) nucleoside, a 2′-O-dimethylaminoethoxyethyl (2′-O-DMAEOE) nucleoside, 2′-O-aminopropyl (2′-O-AP) nucleoside, or 2′-ara-F, or a combination thereof. In some embodiments, the modified nucleoside comprises one or more 2′fluoro modified nucleosides. In some embodiments, the modified nucleoside comprises a 2′ O-alkyl modified nucleoside. In some embodiments, the oligonucleotide comprises a lipid attached at a 3′ or 5′ terminus of the oligonucleotide. In some embodiments, the lipid comprises cholesterol, myristoyl, palmitoyl, stearoyl, lithocholoyl, docosanoyl, docosahexaenoyl, myristyl, palmityl, stearyl, or α-tocopherol, or a combination thereof. In some embodiments, the oligonucleotide comprises 1, 2, 3, 4, 5, 6, 7, 8, 9, 10, 11, 12, 13, 14, 15, 16, 17, 18, 19, 20, or 21 modified nucleosides. In some embodiments, the oligonucleotide comprises 2 or more modified nucleosides, 3 or more modified nucleosides, 4 or more modified nucleosides, 5 or more modified nucleosides, 6 or more modified nucleosides, 7 or more modified nucleosides, 8 or more modified nucleosides, 9 or more modified nucleosides, 10 or more modified nucleosides, 11 or more modified nucleosides, 12 or more modified nucleosides, 13 or more modified nucleosides, 14 or more modified nucleosides, 15 or more modified nucleosides, 16 or more modified nucleosides, 17 or more modified nucleosides, 18 or more modified nucleosides, 19 or more modified nucleosides, 20 or more modified nucleosides, or 21 or more modified nucleosides. In some embodiments, the oligonucleotide comprises a small interfering RNA (siRNA) comprising a sense strand and an antisense strand. In some embodiments, the sense strand is 14-30 nucleosides in length. In some embodiments, the sense strand comprises the sequence of any one of SEQ ID NOs: 1-3636, or a variant thereof (such as a sequence having 1 or 2 substitutions, insertions, or deletions). In some embodiments, any one of the following is true with regard to the sense strand: all purines comprise 2′ fluoro modified purines, and all pyrimidines comprise a mixture of 2′ fluoro and 2′ methyl modified pyrimidines; all purines comprise 2′ methyl modified purines, and all pyrimidines comprise a mixture of 2′ fluoro and 2′ methyl modified pyrimidines; all purines comprise 2′ fluoro modified purines, and all pyrimidines comprise 2′ methyl modified pyrimidines; all pyrimidines comprise 2′ fluoro modified pyrimidines, and all purines comprise a mixture of 2′ fluoro and 2′ methyl modified purines; all pyrimidines comprise 2′ methyl modified pyrimidines, and all purines comprise a mixture of 2′ fluoro and 2′ methyl modified purines; or all pyrimidines comprise 2′ fluoro modified pyrimidines, and all purines comprise 2′ methyl modified purines. In some embodiments, the sense strand comprises any one of modification patterns 1S, 2S, 3S, 4S, 5S, 6S, 7S, 8S, 9S, 10S, 11S, 12S, 13S, 14S, 15S, 16S, 17S, 18S, 19S, 20S, 21S, 22S, 23S, 24S, 25S, 26S, 27S, 28S, 29S,30S, 31S, 32S, 33S, 34S, 35S, 36S, 37S, 38S, 39S, 40S, 41S, or 42S. In some embodiments, the antisense strand is 14-30 nucleosides in length. In some embodiments, the sense strand comprises the sequence of any one of SEQ ID NOs: 3637-7272, or a variant thereof (such as a sequence having 1 or 2 substitutions, insertions, or deletions). In some embodiments, any one of the following is true with regard to the antisense strand: all purines comprise 2′ fluoro modified purines, and all pyrimidines comprise a mixture of 2′ fluoro and 2′ methyl modified pyrimidines; all purines comprise 2′ methyl modified purines, and all pyrimidines comprise a mixture of 2′ fluoro and 2′ methyl modified pyrimidines; all purines comprise 2′ methyl modified purines, and all pyrimidines comprise 2′ fluoro modified pyrimidines; all pyrimidines comprise 2′ fluoro modified pyrimidines, and all purines comprise a mixture of 2′ fluoro and 2′ methyl modified purines; all pyrimidines comprise 2′ methyl modified pyrimidines, and all purines comprise a mixture of 2′ fluoro and 2′ methyl modified purines; or all pyrimidines comprise 2′ methyl modified pyrimidines, and all purines comprise 2′ fluoro modified purines. In some embodiments, the antisense strand comprises any one of modification patterns 1AS, 2AS, 3AS, 4AS, or 5AS. Described herein, in some embodiments, are compositions comprising an oligonucleotide that inhibits the expression of DKK2 wherein the oligonucleotide comprises an siRNA comprising a sense strand and an antisense strand, each strand is independently about 14-30 nucleosides in length, and at least one of the sense strand and the antisense strand comprises a nucleoside sequence comprising about 14-30 contiguous nucleosides of SEQ ID NO: 7599. Described herein, in some embodiments, are compositions comprising an oligonucleotide that inhibits the expression of DKK2, wherein the oligonucleotide comprises an siRNA comprising a sense strand and an antisense strand, each strand is independently about 14-30 nucleosides in length, and at least one of the sense strand and the antisense strand comprises a nucleoside sequence comprising about 14-30 contiguous nucleosides of a full-length human DKK2 pre-mRNA sequence. Described herein, in some embodiments, are methods of treating hair loss in a subject in need thereof comprising administering to the subject a composition described herein. In some embodiments, the hair loss comprises any one or more of male pattern baldness, alopecia areata, or non-scarring hair loss. In some embodiments, the administration is topical.

### BRIEF DESCRIPTION OF THE DRAWINGS

[0004] FIG. 1 is a plot of DKK2 mRNA expression in Lymphoblastoid Cell Lines from donors with known rs35290077 (G96R) genotypes following treatment with Vitamin D or vehicle. The plot shows each copy of the rs35290077 alternative (G) allele results in approximately 50% reduction of DKK2 mRNA induction in the presence of Vitamin D.

[0005] FIG. 2A includes images of 2 mice 14 days following hair removal, and after topical treatment with a negative control siRNA (ETD01043). The images show whitening and graying of the fur on the backs of the mice in the hair that grew back.

[0006] FIG. 2B includes images of 2 mice 14 days following hair removal, and after topical treatment with a DKK2 siRNA (ETD01551). The images indicate that coat color of the mice was retained in the hair that grew back on these mice.

### DETAILED DESCRIPTION OF THE INVENTION

[0007] Large-scale human genetic data can improve the success rate of pharmaceutical discovery and development. A Genome Wide Association Study (GWAS) may detect associations between genetic variants and traits in a population sample. A GWAS may enable better understanding of the biology of disease, and provide applicable treatments. A GWAS can utilize genotyping and/or sequencing data, and often involves an evaluation of millions of genetic variants that are relatively evenly distributed across the genome. The most common GWAS design is the case-control study, which involves comparing variant frequencies in cases versus controls. If a variant has a significantly different frequency in cases versus controls, that variant is said to be associated with disease. Association statistics that may be used in a GWAS are p-values, as a measure of statistical significance; odds ratios (OR), as a measure of effect size; or beta coefficients (beta), as a measure of effect size. Researchers often assume an additive genetic model and calculate an allelic odds ratio, which is the increased (or decreased) risk of disease conferred by each additional copy of an allele (compared to carrying no copies of that allele). An additional concept in design and interpretation of GWAS is that of linkage disequilibrium, which is the non-random association of alleles. The presence of linkage disequilibrium can obfuscate which variant is “causal.”

[0008] Functional annotation of variants and/or wet lab experimentation can identify the causal genetic variant identified via GWAS, and in many cases may lead to the identification of disease-causing genes. In particular, understanding the functional effect of a causal genetic variant (for example, loss of protein function, gain of protein function, increase in gene expression, or decrease in gene expression) may allow that variant to be used as a proxy for therapeutic modulation of the target gene, or to gain insight into potential therapeutic efficacy and safety of a therapeutic that modulates that target.

[0009] Identification of such gene-disease associations has provided insights into disease biology and may be used to identify novel therapeutic targets for the pharmaceutical industry. In order to translate the therapeutic insights derived from human genetics, disease biology in patients may be exogenously ‘programmed’ into replicating the observation from human genetics. There are several potential options for therapeutic modalities that may be brought to bear in translating therapeutic targets identified via human genetics into novel medicines. These may include well established therapeutic modalities such as small molecules and monoclonal antibodies, maturing modalities such as oligonucleotides, and emerging modalities such as gene therapy and gene editing. The choice of therapeutic modality can depend on several factors including the location of a target (for example, intracellular, extracellular, or secreted), a relevant tissue (for example, skin) and a relevant indication.

[0010] Hair loss is a common problem, particularly among men, but is also common among women. It may be affected by any of several factors, including heredity, hormones, thyroid disorders, nutritional status, environmental factors, physical stress, or emotional stress. Hair loss may include, among other things, androgenetic alopecia (male pattern baldness), alopecia areata, or non-scarring hair loss. The DKK2 gene is located on chromosome 4 and encodes dickkopf WNT signaling pathway inhibitor 2 (DKK2), a member of the dickkopf family. A non-limiting example of a DKK2 gene is included on GenBank under NCBI reference sequence NM_014421.3 (May 9, 2020). DKK2 proteins may be secreted, include two cysteine rich regions, and be involved in embryonic development through interactions with the Wnt signaling pathway. DKK2 can act as either an agonist or antagonist of Wnt/beta-catenin signaling, depending on the cellular context and the presence of the co-factor kremen 2. Activity of DKK2 may also be modulated by binding to the Wnt co-receptor LDL-receptor related protein 6 (LRP6). In some cases, DKK2 protein is intracellular. In some cases, DKK2 protein is secreted. The secreted DKK2 protein may be locally secreted. Here, it is shown that genetic variants that cause inactivation of the DKK2 gene in humans are associated with decreased risk of male pattern baldness. Therefore, inhibition of DKK2 serve as a therapeutic strategy for treatment of hair loss such as male pattern baldness, alopecia areata, or non-scarring hair loss.

[0011] Disclosed herein are compositions comprising an oligonucleotide that targets DKK2. The oligonucleotide may include a small interfering RNA (siRNA) or an antisense oligonucleotide (ASO). Also provided herein are methods of treating hair loss by providing an oligonucleotide that targets DKK2 to a subject in need thereof.

### I. Compositions

[0012] Disclosed herein, in some embodiments, are compositions comprising an oligonucleotide. In some embodiments, the composition comprises an oligonucleotide that targets dickkopf WNT signaling pathway inhibitor 2 (DKK2). In some embodiments, the composition consists of an oligonucleotide that targets DKK2. In some embodiments, the oligonucleotide reduces DKK2 mRNA expression in the subject. In some embodiments, the oligonucleotide reduces DKK2 protein expression in the subject. The oligonucleotide may include a small interfering RNA (siRNA) described herein. The oligonucleotide may include an antisense oligonucleotide (ASO) described herein. In some embodiments, a composition described herein is used in a method of treating a disorder in a subject in need thereof. Some embodiments relate to a composition comprising an oligonucleotide for use in a method of treating a disorder as described herein. Some embodiments relate to use of a composition comprising an oligonucleotide, in a method of treating a disorder as described herein.

[0013] Some embodiments include a composition comprising an oligonucleotide that targets DKK2 and when administered to a subject in an effective amount decreases DKK2 mRNA or protein levels in a cell, fluid or tissue. Some embodiments include a composition comprising an oligonucleotide that targets DKK2 and when administered to a subject in an effective amount decreases DKK2 mRNA levels in a cell or tissue. In some embodiments, the cell is a skin cell. In some embodiments, the tissue is skin (e.g. scalp dermis). In some embodiments, the DKK2 mRNA levels are decreased by about 2.5% or more, about 5% or more, or about 7.5% or more, as compared to prior to administration. In some embodiments, the DKK2 mRNA levels are decreased by about 10% or more, as compared to prior to administration. In some embodiments, the DKK2 mRNA levels are decreased by about 20% or more, about 30% or more, about 40% or more, about 50% or more, about 60% or more, about 70% or more, about 80% or more, about 90% or more, or about 100%, as compared to prior to administration. In some embodiments, the DKK2 mRNA levels are decreased by no more than about 2.5%, no more than about 5%, or no more than about 7.5%, as compared to prior to administration. In some embodiments, the DKK2 mRNA levels are decreased by no more than about 10%, as compared to prior to administration. In some embodiments, the DKK2 mRNA levels are decreased by no more than about 20%, no more than about 30%, no more than about 40%, no more than about 50%, no more than about 60%, no more than about 70%, no more than about 80%, no more than about 90%, or no more than about 100%, as compared to prior to administration. In some embodiments, the DKK2 mRNA levels are decreased by 2.5%, 5%, 7.5%, 10%, 15%, 20%, 25%, 30%, 35%, 40%, 45%, 50%, 55%, 60%, 65%, 70%, 75%, 80%, 85%, 90%, 95%, or 100%, or by a range defined by any of the two aforementioned percentages.

[0014] In some embodiments, the composition comprises an oligonucleotide that targets DKK2 and when administered to a subject in an effective amount decreases DKK2 protein levels in a cell, fluid or tissue. In some embodiments, the cell is a skin cell. In some embodiments, the fluid is a blood, serum, or plasma. In some cases, the administration of the oligonucleotide decreases circulatingDKK2 protein levels. In some embodiments, the tissue is skin (e.g. scalp dermis). In some embodiments, the DKK2 protein levels are decreased by about 2.5% or more, about 5% or more, or about 7.5% or more, as compared to prior to administration. In some embodiments, the DKK2 protein levels are decreased by about 10% or more, as compared to prior to administration. In some embodiments, the DKK2 protein levels are decreased by about 20% or more, about 30% or more, about 40% or more, about 50% or more, about 60% or more, about 70% or more, about 80% or more, about 90% or more, or about 100%, as compared to prior to administration. In some embodiments, the DKK2 protein levels are decreased by no more than about 2.5%, no more than about 5%, or no more than about 7.5%, as compared to prior to administration. In some embodiments, the DKK2 protein levels are decreased by no more than about 10%, as compared to prior to administration. In some embodiments, the DKK2 protein levels are decreased by no more than about 20%, no more than about 30%, no more than about 40%, no more than about 50%, no more than about 60%, no more than about 70%, no more than about 80%, no more than about 90%, or no more than about 100%, as compared to prior to administration. In some embodiments, the DKK2 protein levels are decreased by 2.5%, 5%, 7.5%, 10%, 15%, 20%, 25%, 30%, 35%, 40%, 45%, 50%, 55%, 60%, 65%, 70%, 75%, 80%, 85%, 90%, 95%, or 100%, or by a range defined by any of the two aforementioned percentages.

[0015] In some embodiments, the composition comprises an oligonucleotide that targets DKK2 and when administered to a subject in an effective amount decreases hair loss (e.g. male pattern baldness, alopecia areata, or non-scarring hair loss) or a symptom of hair loss. In some embodiments, the hair loss or symptom of hair loss is decreased by about 2.5% or more, about 5% or more, or about 7.5% or more, as compared to prior to administration. In some embodiments, the hair loss or symptom of hair loss is decreased by about 10% or more, as compared to prior to administration. In some embodiments, the hair loss or symptom of hair loss is decreased by about 20% or more, about 30% or more, about 40% or more, about 50% or more, about 60% or more, about 70% or more, about 80% or more, about 90% or more, or about 100%, as compared to prior to administration. In some embodiments, the hair loss or symptom of hair loss is decreased by no more than about 2.5%, no more than about 5%, or no more than about 7.5%, as compared to prior to administration. In some embodiments, the hair loss or symptom of hair loss is decreased by no more than about 10%, as compared to prior to administration. In some embodiments, the hair loss or symptom of hair loss is decreased by no more than about 20%, no more than about 30%, no more than about 40%, no more than about 50%, no more than about 60%, no more than about 70%, no more than about 80%, no more than about 90%, or no more than about 100%, as compared to prior to administration. In some embodiments, the hair loss or symptom of hair loss is decreased by 2.5%, 5%, 7.5%, 10%, 15%, 20%, 25%, 30%, 35%, 40%, 45%, 50%, 55%, 60%, 65%, 70%, 75%, 80%, 85%, 90%, 95%, or 100%, or by a range defined by any of the two aforementioned percentages. In some embodiments, the hair loss or symptom of hair loss is assessed by phototrichogram. In some embodiments, the hair loss or symptom of hair loss is assessed by a macrophotography analysis.

[0016] In some embodiments, the hair loss or symptom of hair loss is assessed by a questionnaire such as a Men's Hair Growth Questionnaire (MHGQ) or a Kingsley Alopecia Profile (KAP) questionnaire. In some embodiments, the hair loss or symptom of hair loss is assessed by a scalp biopsy. In some embodiments, the decrease in hair loss or symptom of hair loss is determined as a change in a hair loss hair loss assessment score. For example, the change in the hair loss assessment score may be an increase in the hair loss assessment score. In some embodiments, the change in the hair loss assessment score is a decrease in the hair loss assessment score. In some embodiments, the hair loss assessment score is obtained as part of an assessment that includes the questionnaire. In some embodiments, the composition comprises an oligonucleotide that targets DKK2 and when administered to a subject in an effective amount results in a change in an hair loss assessment score. In some embodiments, the hair loss assessment score is changed by about 2.5% or more, about 5% or more, or about 7.5% or more, as compared to prior to administration. In some embodiments, the hair loss assessment score is changed by about 10% or more, as compared to prior to administration. In some embodiments, the hair loss assessment score is changed by about 20% or more, about 30% or more, about 40% or more, about 50% or more, about 60% or more, about 70% or more, about 80% or more, about 90% or more, or about 100% or more, as compared to prior to administration. In some embodiments, the hair loss assessment score is changed by about 200% or more, about 300% or more, about 400% or more, about 500% or more, about 600% or more, about 700% or more, about 800% or more, about 900% or more, or about 1000% or more, as compared to prior to administration. In some embodiments, the hair loss assessment score is changed by no more than about 2.5%, no more than about 5%, or no more than about 7.5%, as compared to prior to administration. In some embodiments, the hair loss assessment score is changed by no more than about 10%, as compared to prior to administration. In some embodiments, the hair loss assessment score is changed by no more than about 20%, no more than about 30%, no more than about 40%, no more than about 50%, no more than about 60%, no more than about 70%, no more than about 80%, no more than about 90%, or no more than about 100%, as compared to prior to administration. In some embodiments, the hair loss assessment score is changed by no more than about 200%, no more than about 300%, no more than about 400%, no more than about 500%, no more than about 600%, no more than about 700%, no more than about 800%, no more than about 900%, or no more than about 1000%, as compared to prior to administration. In some embodiments, the hair loss assessment score is changed by 2.5%, 5%, 7.5%, 10%, 15%, 20%, 25%, 30%, 35%, 40%, 45%, 50%, 55%, 60%, 65%, 70%, 75%, 80%, 85%, 90%, 95%, 100%, 150%, 200%, 250%, 300%, 400%, 500%, 600%, 700%, 800%, 900%, or 1000%, or by a range defined by any of the two aforementioned percentages.

[0017] In some embodiments, the composition comprises an oligonucleotide that targets DKK2 and when administered to a subject in an effective amount increases a total hair count (e.g. a vellus and non-vellus hair count). In some embodiments, the total hair count is determined in an area of skin. In some embodiments, the total hair count is increased by about 2.5% or more, about 5% or more, or about 7.5% or more, as compared to prior to administration. In some embodiments, the total hair count is increased by about 10% or more, as compared to prior to administration. In some embodiments, the total hair count is increased by about 20% or more, about 30% or more, about 40% or more, about 50% or more, about 60% or more, about 70% or more, about 80% or more, about 90% or more, or about 100% or more, as compared to prior to administration. In some embodiments, the total hair count is increased by about 200% or more, about 300% or more, about 400% or more, about 500% or more, about 600% or more, about 700% or more, about 800% or more, about 900% or more, or about 1000% or more, as compared to prior to administration. In some embodiments, the total hair count is increased by no more than about 2.5%, no more than about 5%, or no more than about 7.5%, as compared to prior to administration. In some embodiments, the total hair count is increased by no more than about 10%, as compared to prior to administration. In some embodiments, the total hair count is increased by no more than about 20%, no more than about 30%, no more than about 40%, no more than about 50%, no more than about 60%, no more than about 70%, no more than about 80%, no more than about 90%, or no more than about 100%, as compared to prior to administration. In some embodiments, the total hair count is increased by no more than about 200%, no more than about 300%, no more than about 400%, no more than about 500%, no more than about 600%, no more than about 700%, no more than about 800%, no more than about 900%, or no more than about 1000%, as compared to prior to administration. In some embodiments, the total hair count is increased by 2.5%, 5%, 7.5%, 10%, 15%, 20%, 25%, 30%, 35%, 40%, 45%, 50%, 55%, 60%, 65%, 70%, 75%, 80%, 85%, 90%, 95%, 100%, 150%, 200%, 250%, 300%, 400%, 500%, 600%, 700%, 800%, 900%, or 1000%, or by a range defined by any of the two aforementioned percentages. In some embodiments, the total hair count is assessed by phototrichogram. In some embodiments, the total hair count is assessed by a macrophotography analysis.

[0018] In some embodiments, the composition comprises an oligonucleotide that targets DKK2 and when administered to a subject in an effective amount increases a vellus hair count. In some embodiments, the vellus hair count is determined in an area of skin. In some embodiments, the vellus hair count is increased by about 2.5% or more, about 5% or more, or about 7.5% or more, as compared to prior to administration. In some embodiments, the vellus hair count is increased by about 10% or more, as compared to prior to administration. In some embodiments, the vellus hair count is increased by about 20% or more, about 30% or more, about 40% or more, about 50% or more, about 60% or more, about 70% or more, about 80% or more, about 90% or more, or about 100% or more, as compared to prior to administration. In some embodiments, the vellus hair count is increased by about 200% or more, about 300% or more, about 400% or more, about 500% or more, about 600% or more, about 700% or more, about 800% or more, about 900% or more, or about 1000% or more, as compared to prior to administration. In some embodiments, the vellus hair count is increased by no more than about 2.5%, no more than about 5%, or no more than about 7.5%, as compared to prior to administration. In some embodiments, the vellus hair count is increased by no more than about 10%, as compared to prior to administration. In some embodiments, the vellus hair count is increased by no more than about 20%, no more than about 30%, no more than about 40%, no more than about 50%, no more than about 60%, no more than about 70%, no more than about 80%, no more than about 90%, or no more than about 100%, as compared to prior to administration. In some embodiments, the vellus hair count is increased by no more than about 200%, no more than about 300%, no more than about 400%, no more than about 500%, no more than about 600%, no more than about 700%, no more than about 800%, no more than about 900%, or no more than about 1000%, as compared to prior to administration. In some embodiments, the vellus hair count is increased by 2.5%, 5%, 7.5%, 10%, 15%, 20%, 25%, 30%, 35%, 40%, 45%, 50%, 55%, 60%, 65%, 70%, 75%, 80%, 85%, 90%, 95%, 100%, 150%, 200%, 250%, 300%, 400%, 500%, 600%, 700%, 800%, 900%, or 1000%, or by a range defined by any of the two aforementioned percentages. In some embodiments, the vellus hair count is assessed by phototrichogram. In some embodiments, the vellus hair count is assessed by a macrophotography analysis.

[0019] In some embodiments, the composition comprises an oligonucleotide that targets DKK2 and when administered to a subject in an effective amount increases a non-vellus hair count. In some embodiments, the non-vellus hair count is determined in an area of skin. In some embodiments, the non-vellus hair count is increased by about 2.5% or more, about 5% or more, or about 7.5% or more, as compared to prior to administration. In some embodiments, the non-vellus hair count is increased by about 10% or more, as compared to prior to administration. In some embodiments, the non-vellus hair count is increased by about 20% or more, about 30% or more, about 40% or more, about 50% or more, about 60% or more, about 70% or more, about 80% or more, about 90% or more, or about 100% or more, as compared to prior to administration. In some embodiments, the non-vellus hair count is increased by about 200% or more, about 300% or more, about 400% or more, about 500% or more, about 600% or more, about 700% or more, about 800% or more, about 900% or more, or about 1000% or more, as compared to prior to administration. In some embodiments, the non-vellus hair count is increased by no more than about 2.5%, no more than about 5%, or no more than about 7.5%, as compared to prior to administration. In some embodiments, the non-vellus hair count is increased by no more than about 10%, as compared to prior to administration. In some embodiments, the non-vellus hair count is increased by no more than about 20%, no more than about 30%, no more than about 40%, no more than about 50%, no more than about 60%, no more than about 70%, no more than about 80%, no more than about 90%, or no more than about 100%, as compared to prior to administration. In some embodiments, the non-vellus hair count is increased by no more than about 200%, no more than about 300%, no more than about 400%, no more than about 500%, no more than about 600%, no more than about 700%, no more than about 800%, no more than about 900%, or no more than about 1000%, as compared to prior to administration. In some embodiments, the non-vellus hair count is increased by 2.5%, 5%, 7.5%, 10%, 15%, 20%, 25%, 30%, 35%, 40%, 45%, 50%, 55%, 60%, 65%, 70%, 75%, 80%, 85%, 90%, 95%, 100%, 150%, 200%, 250%, 300%, 400%, 500%, 600%, 700%, 800%, 900%, or 1000%, or by a range defined by any of the two aforementioned percentages. In some embodiments, the non-vellus hair count is assessed by phototrichogram. In some embodiments, the non-vellus hair count is assessed by a macrophotography analysis.

[0020] In some embodiments, the composition comprises an oligonucleotide that targets DKK2 and when administered to a subject in an effective amount increases hair thickness. In some embodiments, the thicknesses (e.g. widths) of individual hairs are increased. In some embodiments, the hair thickness is determined in an area of skin. The increased hair thickness may include an increased vellus hair thickness. The increased hair thickness may include an increased non-vellus hair thickness. In some embodiments, the hair thickness is increased by about 2.5% or more, about 5% or more, or about 7.5% or more, as compared to prior to administration. In some embodiments, the hair thickness is increased by about 10% or more, as compared to prior to administration. In some embodiments, the hair thickness is increased by about 20% or more, about 30% or more, about 40% or more, about 50% or more, about 60% or more, about 70% or more, about 80% or more, about 90% or more, or about 100% or more, as compared to prior to administration. In some embodiments, the hair thickness is increased by about 200% or more, about 300% or more, about 400% or more, about 500% or more, about 600% or more, about 700% or more, about 800% or more, about 900% or more, or about 1000% or more, as compared to prior to administration. In some embodiments, the hair thickness is increased by no more than about 2.5%, no more than about 5%, or no more than about 7.5%, as compared to prior to administration. In some embodiments, the hair thickness is increased by no more than about 10%, as compared to prior to administration. In some embodiments, the hair thickness is increased by no more than about 20%, no more than about 30%, no more than about 40%, no more than about 50%, no more than about 60%, no more than about 70%, no more than about 80%, no more than about 90%, or no more than about 100%, as compared to prior to administration. In some embodiments, the hair thickness is increased by no more than about 200%, no more than about 300%, no more than about 400%, no more than about 500%, no more than about 600%, no more than about 700%, no more than about 800%, no more than about 900%, or no more than about 1000%, as compared to prior to administration. In some embodiments, the hair thickness is increased by 2.5%, 5%, 7.5%, 10%, 15%, 20%, 25%, 30%, 35%, 40%, 45%, 50%, 55%, 60%, 65%, 70%, 75%, 80%, 85%, 90%, 95%, 100%, 150%, 200%, 250%, 300%, 400%, 500%, 600%, 700%, 800%, 900%, or 1000%, or by a range defined by any of the two aforementioned percentages. In some embodiments, the hair thickness is assessed by phototrichogram. In some embodiments, the hair thickness is assessed by a macrophotography analysis.

[0021] In some embodiments, the composition comprises an oligonucleotide that targets DKK2 and when administered to a subject in an effective amount increases hair density. In some embodiments, the hair density is determined in an area of skin. In some embodiments, the hair density comprises a number of hairs per an area of skin. The increased hair density may include an increased vellus hair density. The increased hair density may include an increased non-vellus hair density. In some embodiments, the hair density is increased by about 2.5% or more, about 5% or more, or about 7.5% or more, as compared to prior to administration. In some embodiments, the hair density is increased by about 10% or more, as compared to prior to administration. In some embodiments, the hair density is increased by about 20% or more, about 30% or more, about 40% or more, about 50% or more, about 60% or more, about 70% or more, about 80% or more, about 90% or more, or about 100% or more, as compared to prior to administration. In some embodiments, the hair density is increased by about 200% or more, about 300% or more, about 400% or more, about 500% or more, about 600% or more, about 700% or more, about 800% or more, about 900% or more, or about 1000% or more, as compared to prior to administration. In some embodiments, the hair density is increased by no more than about 2.5%, no more than about 5%, or no more than about 7.5%, as compared to prior to administration. In some embodiments, the hair density is increased by no more than about 10%, as compared to prior to administration. In some embodiments, the hair density is increased by no more than about 20%, no more than about 30%, no more than about 40%, no more than about 50%, no more than about 60%, no more than about 70%, no more than about 80%, no more than about 90%, or no more than about 100%, as compared to prior to administration. In some embodiments, the hair density is increased by no more than about 200%, no more than about 300%, no more than about 400%, no more than about 500%, no more than about 600%, no more than about 700%, no more than about 800%, no more than about 900%, or no more than about 1000%, as compared to prior to administration. In some embodiments, the hair density is increased by 2.5%, 5%, 7.5%, 10%, 15%, 20%, 25%, 30%, 35%, 40%, 45%, 50%, 55%, 60%, 65%, 70%, 75%, 80%, 85%, 90%, 95%, 100%, 150%, 200%, 250%, 300%, 400%, 500%, 600%, 700%, 800%, 900%, or 1000%, or by a range defined by any of the two aforementioned percentages. In some embodiments, the hair density is assessed by phototrichogram. In some embodiments, the hair density is assessed by a macrophotography analysis.

[0022] In some embodiments, the composition comprises an oligonucleotide that targets DKK2 and when administered to a subject in an effective amount increases a number of hair follicles. In some embodiments, the number of hair follicles is determined in an area of skin. The hair follicles may include terminal hair follicles, anagen hair follicles, telogen hair follicles, catagen hair follicles, vellus or vellus-like miniaturized hair follicles, or indeterminate hair follicles. In some embodiments, the hair follicles include terminal hair follicles. In some embodiments, the hair follicles include anagen hair follicles. In some embodiments, the hair follicles include telogen hair follicles. In some embodiments, the hair follicles include catagen hair follicles. In some embodiments, the hair follicles include vellus or vellus-like miniaturized hair follicles. In some embodiments, the hair follicles include indeterminate hair follicles. In some embodiments, the number of hair follicles is increased by about 2.5% or more, about 5% or more, or about 7.5% or more, as compared to prior to administration. In some embodiments, the number of hair follicles is increased by about 10% or more, as compared to prior to administration. In some embodiments, the number of hair follicles is increased by about 20% or more, about 30% or more, about 40% or more, about 50% or more, about 60% or more, about 70% or more, about 80% or more, about 90% or more, or about 100% or more, as compared to prior to administration. In some embodiments, the number of hair follicles is increased by about 200% or more, about 300% or more, about 400% or more, about 500% or more, about 600% or more, about 700% or more, about 800% or more, about 900% or more, or about 1000% or more, as compared to prior to administration. In some embodiments, the number of hair follicles is increased by no more than about 2.5%, no more than about 5%, or no more than about 7.5%, as compared to prior to administration. In some embodiments, the number of hair follicles is increased by no more than about 10%, as compared to prior to administration. In some embodiments, the number of hair follicles is increased by no more than about 20%, no more than about 30%, no more than about 40%, no more than about 50%, no more than about 60%, no more than about 70%, no more than about 80%, no more than about 90%, or no more than about 100%, as compared to prior to administration. In some embodiments, the number of hair follicles is increased by no more than about 200%, no more than about 300%, no more than about 400%, no more than about 500%, no more than about 600%, no more than about 700%, no more than about 800%, no more than about 900%, or no more than about 1000%, as compared to prior to administration. In some embodiments, the number of hair follicles is increased by 2.5%, 5%, 7.5%, 10%, 15%, 20%, 25%, 30%, 35%, 40%, 45%, 50%, 55%, 60%, 65%, 70%, 75%, 80%, 85%, 90%, 95%, 100%, 150%, 200%, 250%, 300%, 400%, 500%, 600%, 700%, 800%, 900%, or 1000%, or by a range defined by any of the two aforementioned percentages. In some embodiments, the number of hair follicles is assessed in a scalp biopsy.

[0023] In some embodiments, the composition comprises an oligonucleotide that targets DKK2 and when administered to a subject in an effective amount increases a hair color measurement. In some embodiments, the hair color measurement is determined on an area of skin. In some embodiments, the hair color measurement is increased by about 2.5% or more, about 5% or more, or about 7.5% or more, as compared to prior to administration. In some embodiments, the hair color measurement is increased by about 10% or more, as compared to prior to administration. In some embodiments, the hair color measurement is increased by about 20% or more, about 30% or more, about 40% or more, about 50% or more, about 60% or more, about 70% or more, about 80% or more, about 90% or more, or about 100% or more, as compared to prior to administration. In some embodiments, the hair color measurement is increased by about 200% or more, about 300% or more, about 400% or more, about 500% or more, about 600% or more, about 700% or more, about 800% or more, about 900% or more, or about 1000% or more, as compared to prior to administration. In some embodiments, the hair color measurement is increased by no more than about 2.5%, no more than about 5%, or no more than about 7.5%, as compared to prior to administration. In some embodiments, the hair color measurement is increased by no more than about 10%, as compared to prior to administration. In some embodiments, the hair color measurement is increased by no more than about 20%, no more than about 30%, no more than about 40%, no more than about 50%, no more than about 60%, no more than about 70%, no more than about 80%, no more than about 90%, or no more than about 100%, as compared to prior to administration. In some embodiments, the hair color measurement is increased by no more than about 200%, no more than about 300%, no more than about 400%, no more than about 500%, no more than about 600%, no more than about 700%, no more than about 800%, no more than about 900%, or no more than about 1000%, as compared to prior to administration. In some embodiments, the hair color measurement is increased by 2.5%, 5%, 7.5%, 10%, 15%, 20%, 25%, 30%, 35%, 40%, 45%, 50%, 55%, 60%, 65%, 70%, 75%, 80%, 85%, 90%, 95%, 100%, 150%, 200%, 250%, 300%, 400%, 500%, 600%, 700%, 800%, 900%, or 1000%, or by a range defined by any of the two aforementioned percentages.

[0024] In some embodiments, the composition comprises an oligonucleotide that targets DKK2 and when administered to a subject in an effective amount results in a change in expression of a gene or protein. The gene or protein may include a β-catenin gene. The gene or protein may include a β-catenin protein. The gene or protein may include an α-SMA gene. The gene or protein may include an α-SMA protein. The gene or protein may include a collagen I gene. The gene or protein may include a collagen I protein. The gene or protein may include a collagen III gene. The gene or protein may include a collagen III protein. In some embodiments, the change in expression is determined in a tissue (e.g. skin), cell, or fluid sample. In some embodiments, the expression is changed by about 2.5% or more, about 5% or more, or about 7.5% or more, as compared to prior to administration. In some embodiments, the expression is changed by about 10% or more, as compared to prior to administration. In some embodiments, the expression is changed by about 20% or more, about 30% or more, about 40% or more, about 50% or more, about 60% or more, about 70% or more, about 80% or more, about 90% or more, or about 100% or more, as compared to prior to administration. In some embodiments, the expression is changed by about 200% or more, about 300% or more, about 400% or more, about 500% or more, about 600% or more, about 700% or more, about 800% or more, about 900% or more, or about 1000% or more, as compared to prior to administration. In some embodiments, the expression is changed by no more than about 2.5%, no more than about 5%, or no more than about 7.5%, as compared to prior to administration. In some embodiments, the expression is changed by no more than about 10%, as compared to prior to administration. In some embodiments, the expression is changed by no more than about 20%, no more than about 30%, no more than about 40%, no more than about 50%, no more than about 60%, no more than about 70%, no more than about 80%, no more than about 90%, or no more than about 100%, as compared to prior to administration. In some embodiments, the expression is changed by no more than about 200%, no more than about 300%, no more than about 400%, no more than about 500%, no more than about 600%, no more than about 700%, no more than about 800%, no more than about 900%, or no more than about 1000%, as compared to prior to administration. In some embodiments, the expression is changed by 2.5%, 5%, 7.5%, 10%, 15%, 20%, 25%, 30%, 35%, 40%, 45%, 50%, 55%, 60%, 65%, 70%, 75%, 80%, 85%, 90%, 95%, 100%, 150%, 200%, 250%, 300%, 400%, 500%, 600%, 700%, 800%, 900%, or 1000%, or by a range defined by any of the two aforementioned percentages.

A. siRNAs

[0025] In some embodiments, the composition comprises an oligonucleotide that targets DKK2, wherein the oligonucleotide comprises a small interfering RNA (siRNA). In some embodiments, the composition comprises an oligonucleotide that targets DKK2, wherein the oligonucleotide comprises a small interfering RNA (siRNA) comprising a sense strand and an antisense strand.

[0026] In some embodiments, the composition comprises an oligonucleotide that inhibits the expression of DKK2, wherein the oligonucleotide comprises an siRNA comprising a sense strand and an antisense strand, wherein the sense strand is 14-30 nucleosides in length. In some embodiments, the composition comprises a sense strange that is at least about 10, 11, 12, 13, 14, 15, 15, 17, 18, 19, 20, 21, 22, 23, 24, 25, 26, 27, 28, 29, or 30 nucleosides in length, or a range defined by any of the two aforementioned numbers. In some embodiments, the composition comprises an antisense strand is 14-30 nucleosides in length. In some embodiments, the composition comprises an antisense strange that is at least about 10, 11, 12, 13, 14, 15, 15, 17, 18, 19, 20, 21, 22, 23, 24, 25, 26, 27, 28, 29, or 30 nucleosides in length, or a range defined by any of the two aforementioned numbers.

[0027] In some embodiments, the composition comprises an oligonucleotide that inhibits the expression of DKK2, wherein the oligonucleotide comprises an siRNA comprising a sense strand and an antisense strand, each strand is independently about 14-30 nucleosides in length, and at least one of the sense strand and the antisense strand comprises a nucleoside sequence comprising about 14-30 contiguous nucleosides of a full-length human DKK2 pre-mRNA sequence. In some embodiments, at least one of the sense strand and the antisense strand comprise a nucleoside sequence comprising at least about 10, 11, 12, 13, 14, 15, 15, 17, 18, 19, 20, 21, 22, 23, 24, 25, 26, 27, 28, 29, 30, or more contiguous nucleosides of the pre-mRNA sequence.

[0028] In some embodiments, the composition comprises an oligonucleotide that inhibits the expression of DKK2, wherein the oligonucleotide comprises an siRNA comprising a sense strand and an antisense strand, each strand is independently about 14-30 nucleosides in length, and at least one of the sense strand and the antisense strand comprises a nucleoside sequence comprising about 14-30 contiguous nucleosides of a full-length human DKK2 mRNA sequence such as SEQ ID NO: 7599. In some embodiments, at least one of the sense strand and the antisense strand comprise a nucleoside sequence comprising at least about 10, 11, 12, 13, 14, 15, 15, 17, 18, 19, 20, 21, 22, 23, 24, 25, 26, 27, 28, 29, 30, or more contiguous nucleosides of one of SEQ ID NO: 7599.

[0029] In some embodiments, the composition comprises an oligonucleotide that inhibits the expression of DKK2, wherein the oligonucleotide comprises an siRNA comprising a sense strand and an antisense strand, wherein the sense strand and the antisense strand form a double-stranded RNA duplex. In some embodiments, the first base pair of the double-stranded RNA duplex is an AU base pair.

[0030] In some embodiments, the sense strand further comprises a 3′ overhang. In some embodiments, the 3′ overhang comprises 1, 2, 3, 4, 5, 6, 7, 8, 9, or 10 nucleosides, or a range of nucleotides defined by any two of the aforementioned numbers. In some embodiments, the 3′ overhang comprises 1, 2, or more nucleosides. In some embodiments, the 3′ overhang comprises 2 nucleosides. In some embodiments, the sense strand further comprises a 5′ overhang. In some embodiments, the 5′ overhang comprises 1, 2, 3, 4, 5, 6, 7, 8, 9, or 10 nucleosides, or a range of nucleotides defined by any two of the aforementioned numbers. In some embodiments, the 5′ overhang comprises 1, 2, or more nucleosides. In some embodiments, the 5′ overhang comprises 2 nucleosides.

[0031] In some embodiments, the antisense strand further comprises a 3′ overhang. In some embodiments, the 3′ overhang comprises 1, 2, 3, 4, 5, 6, 7, 8, 9, or 10 nucleosides, or a range of nucleotides defined by any two of the aforementioned numbers. In some embodiments, the 3′ overhang comprises 1, 2, or more nucleosides. In some embodiments, the 3′ overhang comprises 2 nucleosides. In some embodiments, the antisense strand further comprises a 5′ overhang. In some embodiments, the 5′ overhang comprises 1, 2, 3, 4, 5, 6, 7, 8, 9, or 10 nucleosides, or a range of nucleotides defined by any two of the aforementioned numbers. In some embodiments, the 5′ overhang comprises 1, 2, or more nucleosides. In some embodiments, the 5′ overhang comprises 2 nucleosides.

[0032] In some embodiments, the composition comprises an oligonucleotide that inhibits the expression of DKK2, wherein the oligonucleotide comprises an siRNA comprising a sense strand and an antisense strand, wherein the siRNA binds with a 19mer in a human DKK2 mRNA. In some embodiments, the siRNA binds with a 12mer, a 13mer, a 14mer, a 15mer, a 16mer, a 17mer, a 18mer, a 19mer, a 20mer, a 21mer, a 22mer, a 23mer, a 24mer, or a 25mer in a human DKK2 mRNA.

[0033] In some embodiments, the composition comprises an oligonucleotide that inhibits the expression of DKK2, wherein the oligonucleotide comprises an siRNA comprising a sense strand and an antisense strand, wherein the siRNA binds with a 17mer in a non-human primate DKK2 mRNA. In some embodiments, the siRNA binds with a 12mer, a 13mer, a 14mer, a 15mer, a 16mer, a 17mer, a 18mer, a 19mer, a 20mer, a 21mer, a 22mer, a 23mer, a 24mer, or a 25mer in a non-human primate DKK2 mRNA.

[0034] In some embodiments, the composition comprises an oligonucleotide that inhibits the expression of DKK2, wherein the oligonucleotide comprises an siRNA comprising a sense strand and an antisense strand, wherein the siRNA binds with a 19mer in a human DKK2 mRNA, or a combination thereof. In some embodiments, the siRNA binds with a 12mer, a 13mer, a 14mer, a 15mer, a 16mer, a 17mer, and 18mer, a 19mer, a 20mer, a 21mer, a 22mer, a 23mer, a 24mer, or a 25mer in a human DKK2 mRNA.

[0035] In some embodiments, the composition comprises an oligonucleotide that inhibits the expression of DKK2, wherein the oligonucleotide comprises an siRNA comprising a sense strand and an antisense strand, wherein the siRNA binds with a human DKK2 mRNA and less than or equal to 20 human off-targets, with no more than 2 mismatches in the antisense strand. In some embodiments, the siRNA binds with a human DKK2 mRNA and less than or equal to 10 human off-targets, with no more than 2 mismatches in the antisense strand. In some embodiments, the siRNA binds with a human DKK2 mRNA and less than or equal to 30 human off-targets, with no more than 2 mismatches in the antisense strand. In some embodiments, the siRNA binds with a human DKK2 mRNA and less than or equal to 40 human off-targets, with no more than 2 mismatches in the antisense strand. In some embodiments, the siRNA binds with a human DKK2 mRNA and less than or equal to 50 human off-targets, with no more than 2 mismatches in the antisense strand. In some embodiments, the siRNA binds with a human DKK2 mRNA and less than or equal to 10 human off-targets, with no more than 3 mismatches in the antisense strand. In some embodiments, the siRNA binds with a human DKK2 mRNA and less than or equal to 20 human off-targets, with no more than 3 mismatches in the antisense strand. In some embodiments, the siRNA binds with a human DKK2 mRNA and less than or equal to 30 human off-targets, with no more than 3 mismatches in the antisense strand. In some embodiments, the siRNA binds with a human DKK2 mRNA and less than or equal to 40 human off-targets, with no more than 3 mismatches in the antisense strand. In some embodiments, the siRNA binds with a human DKK2 mRNA and less than or equal to 50 human off-targets, with no more than 3 mismatches in the antisense strand.

[0036] In some embodiments, the composition comprises an oligonucleotide that inhibits the expression of DKK2, wherein the oligonucleotide comprises an siRNA comprising a sense strand and an antisense strand, siRNA binds with a human DKK2 mRNA target site that does not harbor an SNP, with a minor allele frequency (MAF) greater or equal to 1% (pos. 2-18). In some embodiments, the MAF is greater or equal to about 2%, about 3%, about 4%, about 5%, about 6%, about 7%, about 8%, about 9%, about 10%, about 11%, about 12%, about 13%, about 14%, about 15%, about 16%, about 17%, about 18%, about 19%, or about 20%.

[0037] In some embodiments, the siRNA comprises a sense strand or antisense strand having a sequence in accordance with the sense strand or antisense strand sequence of an siRNA in Table 2B. In some embodiments, the sense strand or antisense strand comprises a sequence at least 75% identical, at least 80% identical, at least 85% identical, at least 90% identical, or at least 95% identical, to a sense strand or antisense strand sequence in Table 2B. In some embodiments, the sense strand or antisense strand comprises a sequence of a sense or antisense strand in Table 2B, or a sequence thereof having 3 or 4 nucleoside substitutions, additions, or deletions. In some embodiments, the sense strand or antisense strand comprises a sequence of a sense or antisense strand in Table 2B, or a sequence thereof having 1 or 2 nucleoside substitutions, additions, or deletions. In some embodiments, the sense strand or antisense sequence comprises or consists of a sequence 100% identical to a sense strand or antisense strand sequence in Table 2B. The sense strand or antisense strand may comprise an overhang. The sense strand or antisense strand may comprise any modifications described herein. The sense strand or antisense strand may comprise a lipid moiety or a GalNAc moiety.

[0038] In some embodiments, the siRNA comprises a sense strand or antisense strand having a sequence in accordance with a base sequence of an siRNA in any of Table 4-6. In some embodiments, the sense strand or antisense strand sequence comprises or consists of sequence at least 75% identical, at least 80% identical, at least 85% identical, at least 90% identical, or at least 95% identical to a base sequence of an siRNA in any of Table 4-6. In some embodiments, the sense strand or antisense strand sequence comprises or consists of the sequence of a base sequence of an siRNA in any of Table 4-6, or a sense strand or antisense strand sequence thereof having 1, 2, 3, or 4 nucleoside substitutions, additions, or deletions. In some embodiments, the sense strand or antisense strand sequence comprises or consists of the sequence of a base sequence of an siRNA in any of Table 4-6, or a sense strand or antisense strand sequence thereof having 1 or 2 nucleoside substitutions, additions, or deletions. In some embodiments, the sense strand or antisense strand sequence comprises or consists of a sequence 100% identical to a base sequence of an siRNA in any of Table 4-6. The sense strand or antisense strand sequence may include the first 5, 6, 7, 8, 9, 10, 11, 12, 13, 14, 15, 16, 17, 18, or 19 nucleotides (in the 5′ to 3′ direction) of any of the aforementioned sequences. The sense strand or antisense strand sequence may include the last 5, 6, 7, 8, 9, 10, 11, 12, 13, 14, 15, 16, 17, 18, or 19 nucleotides (in the 5′ to 3′ direction) of any of the aforementioned sequences. The sense strand or antisense strand may comprise a modification pattern described herein. The sense strand or antisense strand may comprise, or may lack an overhang. The sense strand or antisense strand may comprise a lipid moiety. The sense strand or antisense strand may comprise a GalNAc moiety.

[0039] In some embodiments, the siRNA comprises a sense strand having a sequence in accordance with any of SEQ ID NOs: 1-3636. In some embodiments, the sense strand sequence comprises or consists of sequence at least 75% identical to any one of SEQ ID NOs: 1-3636, at least 80% identical to any one of SEQ ID NOs: 1-3636, at least 85% identical to of any one of SEQ ID NOs: 1-3636, at least 90% identical to any one of SEQ ID NOs: 1-3636, or at least 95% identical to any one of SEQ ID NOs: 1-3636. In some embodiments, the sense strand sequence comprises or consists of the sequence of any one of SEQ ID NOs: 1-3636, or a sense strand sequence thereof having 1, 2, 3, or 4 nucleoside substitutions, additions, or deletions. In some embodiments, the sense strand sequence comprises or consists of the sequence of any one of SEQ ID NOs: 1-3636, or a sense strand sequence thereof having 1 or 2 nucleoside substitutions, additions, or deletions. In some embodiments, the sense strand sequence comprises or consists of a sequence 100% identical to SEQ ID NOs: 1-3636. The sense strand sequence may include the first 5, 6, 7, 8, 9, 10, 11, 12, 13, 14, 15, 16, 17, 18, or 19 nucleotides (in the 5′ to 3′ direction) of any of the aforementioned sequences. The sense strand sequence may include the last 5, 6, 7, 8, 9, 10, 11, 12, 13, 14, 15, 16, 17, 18, or 19 nucleotides (in the 5′ to 3′ direction) of any of the aforementioned sequences. The sense strand may comprise a modification pattern described herein. The sense strand may comprise an overhang. The sense strand may comprise a lipid moiety. The sense strand may comprise a GalNAc moiety.

[0040] In some embodiments, the siRNA comprises an antisense strand having a sequence in accordance with any of SEQ ID NOs: 3637-7272. In some embodiments, the antisense strand sequence comprises or consists of sequence at least 75% identical to any one of SEQ ID NOs: 3637-7272, at least 80% identical to any one of SEQ ID NOs: 3637-7272, at least 85% identical to of any one of SEQ ID NOs: 5491-10980, at least 90% identical to any one of SEQ ID NOs: 3637-7272, or at least 95% identical to any one of SEQ ID NOs: 3637-7272. In some embodiments, the antisense strand sequence comprises or consists of the sequence of any one of SEQ ID NOs: 3637-7272, or an antisense strand sequence thereof having 1, 2, 3, or 4 nucleoside substitutions, additions, or deletions. In some embodiments, the antisense strand sequence comprises or consists of the sequence of any one of SEQ ID NOs: 3637-7272, or an antisense strand sequence thereof having 1 or 2 nucleoside substitutions, additions, or deletions. In some embodiments, the antisense strand sequence comprises or consists of a sequence 100% identical to SEQ ID NOs: 3637-7272. The antisense strand sequence may include the first 5, 6, 7, 8, 9, 10, 11, 12, 13, 14, 15, 16, 17, 18, or 19 nucleotides (in the 5′ to 3′ direction) of any of the aforementioned sequences. The antisense strand sequence may include the last 5, 6, 7, 8, 9, 10, 11, 12, 13, 14, 15, 16, 17, 18, or 19 nucleotides (in the 5′ to 3′ direction) of any of the aforementioned sequences. The antisense strand may comprise an overhang. The antisense strand may comprise a modification pattern described herein. The antisense strand may comprise a lipid moiety or a GalNAc moiety.

[0041] In some embodiments, the siRNA comprises a sense strand or antisense strand having a sequence in accordance with the sense strand or antisense strand sequence of an siRNA of subset A. In some embodiments, the sense strand or antisense strand comprises a sequence at least 75% identical, at least 80% identical, at least 85% identical, at least 90% identical, or at least 95% identical, to a sense strand or antisense strand sequence of subset A. In some embodiments, the sense strand or antisense strand comprises a sequence of a sense or antisense strand of subset A, or a sequence thereof having 3 or 4 nucleoside substitutions, additions, or deletions. In some embodiments, the sense strand or antisense strand comprises a sequence of a sense or antisense strand of subset A, or a sequence thereof having 1 or 2 nucleoside substitutions, additions, or deletions. In some embodiments, the sense strand or antisense sequence comprises or consists of a sequence 100% identical to a sense strand or antisense strand sequence of subset A. The sense strand or antisense strand may comprise any modifications described herein. The sense strand or antisense strand may comprise a lipid moiety or a GalNAc moiety.

[0042] In some embodiments, the siRNA comprises a sense strand or antisense strand having a sequence in accordance with the sense strand or antisense strand sequence of an siRNA of subset B. In some embodiments, the sense strand or antisense strand comprises a sequence at least 75% identical, at least 80% identical, at least 85% identical, at least 90% identical, or at least 95% identical, to a sense strand or antisense strand sequence of subset B. In some embodiments, the sense strand or antisense strand comprises a sequence of a sense or antisense strand of subset B, or a sequence thereof having 3 or 4 nucleoside substitutions, additions, or deletions. In some embodiments, the sense strand or antisense strand comprises a sequence of a sense or antisense strand of subset B, or a sequence thereof having 1 or 2 nucleoside substitutions, additions, or deletions. In some embodiments, the sense strand or antisense sequence comprises or consists of a sequence 100% identical to a sense strand or antisense strand sequence of subset B. The sense strand or antisense strand may comprise any modifications described herein. The sense strand or antisense strand may comprise a lipid moiety or a GalNAc moiety.

[0043] In some embodiments, the siRNA comprises a sense strand or antisense strand having a sequence in accordance with the sense strand or antisense strand sequence of an siRNA of subset C. In some embodiments, the sense strand or antisense strand comprises a sequence at least 75% identical, at least 80% identical, at least 85% identical, at least 90% identical, or at least 95% identical, to a sense strand or antisense strand sequence of subset C. In some embodiments, the sense strand or antisense strand comprises a sequence of a sense or antisense strand of subset C, or a sequence thereof having 3 or 4 nucleoside substitutions, additions, or deletions. In some embodiments, the sense strand or antisense strand comprises a sequence of a sense or antisense strand of subset C, or a sequence thereof having 1 or 2 nucleoside substitutions, additions, or deletions. In some embodiments, the sense strand or antisense sequence comprises or consists of a sequence 100% identical to a sense strand or antisense strand sequence of subset C. The sense strand or antisense strand may comprise any modifications described herein. The sense strand or antisense strand may comprise a lipid moiety or a GalNAc moiety.

[0044] In some embodiments, the siRNA comprises a sense strand or antisense strand having a sequence in accordance with the sense strand or antisense strand sequence of an siRNA of subset D. In some embodiments, the sense strand or antisense strand comprises a sequence at least 75% identical, at least 80% identical, at least 85% identical, at least 90% identical, or at least 95% identical, to a sense strand or antisense strand sequence of subset D. In some embodiments, the sense strand or antisense strand comprises a sequence of a sense or antisense strand of subset D, or a sequence thereof having 3 or 4 nucleoside substitutions, additions, or deletions. In some embodiments, the sense strand or antisense strand comprises a sequence of a sense or antisense strand of subset D, or a sequence thereof having 1 or 2 nucleoside substitutions, additions, or deletions. In some embodiments, the sense strand or antisense sequence comprises or consists of a sequence 100% identical to a sense strand or antisense strand sequence of subset D. The sense strand or antisense strand may comprise any modifications described herein. The sense strand or antisense strand may comprise a lipid moiety or a GalNAc moiety.

[0045] In some embodiments, the siRNA comprises a sense strand or antisense strand having a sequence in accordance with the sense strand or antisense strand sequence of an siRNA of subset E. In some embodiments, the sense strand or antisense strand comprises a sequence at least 75% identical, at least 80% identical, at least 85% identical, at least 90% identical, or at least 95% identical, to a sense strand or antisense strand sequence of subset E. In some embodiments, the sense strand or antisense strand comprises a sequence of a sense or antisense strand of subset E, or a sequence thereof having 3 or 4 nucleoside substitutions, additions, or deletions. In some embodiments, the sense strand or antisense strand comprises a sequence of a sense or antisense strand of subset E, or a sequence thereof having 1 or 2 nucleoside substitutions, additions, or deletions. In some embodiments, the sense strand or antisense sequence comprises or consists of a sequence 100% identical to a sense strand or antisense strand sequence of subset E. The sense strand or antisense strand may comprise any modifications described herein. The sense strand or antisense strand may comprise a lipid moiety or a GalNAc moiety.

[0046] In some embodiments, the siRNA comprises a sense strand or antisense strand having a sequence in accordance with the sense strand or antisense strand sequence of an siRNA of subset F. In some embodiments, the sense strand or antisense strand comprises a sequence at least 75% identical, at least 80% identical, at least 85% identical, at least 90% identical, or at least 95% identical, to a sense strand or antisense strand sequence of subset F. In some embodiments, the sense strand or antisense strand comprises a sequence of a sense or antisense strand of subset F, or a sequence thereof having 3 or 4 nucleoside substitutions, additions, or deletions. In some embodiments, the sense strand or antisense strand comprises a sequence of a sense or antisense strand of subset F, or a sequence thereof having 1 or 2 nucleoside substitutions, additions, or deletions. In some embodiments, the sense strand or antisense sequence comprises or consists of a sequence 100% identical to a sense strand or antisense strand sequence of subset F. The sense strand or antisense strand may comprise any modifications described herein. The sense strand or antisense strand may comprise a lipid moiety or a GalNAc moiety.

### B. ASOs

[0047] In some embodiments, the composition comprises an oligonucleotide that inhibits the expression of DKK2, wherein the oligonucleotide comprises an antisense oligonucleotide (ASO). In some embodiments, the ASO is 12-30 nucleosides in length. In some embodiments, the ASO is 14-30 nucleosides in length. In some embodiments, the ASO is at least about 10, 11, 12, 13, 14, 15, 15, 17, 18, 19, 20, 21, 22, 23, 24, 25, 26, 27, 28, 29, or 30 nucleosides in length, or a range defined by any of the two aforementioned numbers. In some embodiments, the ASO is 15-25 nucleosides in length. In some embodiments, the ASO is 20 nucleosides in length.

[0048] In some embodiments, the composition comprises an oligonucleotide that inhibits the expression of DKK2, wherein the oligonucleotide comprises an ASO about 12-30 nucleosides in length and comprising a nucleoside sequence comprising about 12-30 contiguous nucleosides of a full-length human DKK2 pre-mRNA sequence; wherein (i) the oligonucleotide comprises a modification comprising a modified nucleoside and/or a modified internucleoside linkage, and/or (ii) the composition comprises a pharmaceutically acceptable carrier.

[0049] In some embodiments, the composition comprises an oligonucleotide that inhibits the expression of DKK2, wherein the oligonucleotide comprises an ASO about 12-30 nucleosides in length and comprising a nucleoside sequence comprising about 12-30 contiguous nucleosides of a full-length human DKK2 mRNA sequence such as SEQ ID NO: 7599; wherein (i) the oligonucleotide comprises a modification comprising a modified nucleoside and/or a modified internucleoside linkage, and/or (ii) the composition comprises a pharmaceutically acceptable carrier.

### C. Modification Patterns

[0050] In some embodiments, the composition comprises an oligonucleotide that inhibits the expression of DKK2, wherein the oligonucleotide comprises a modification comprising a modified nucleoside and/or a modified internucleoside linkage, and/or (ii) the composition comprises a pharmaceutically acceptable carrier. In some embodiments, the oligonucleotide comprises a modification comprising a modified nucleoside and/or a modified internucleoside linkage. In some embodiments, the oligonucleotide comprises a modified internucleoside linkage. In some embodiments, the modified internucleoside linkage comprises alkylphosphonate, phosphorothioate, methylphosphonate, phosphorodithioate, alkylphosphonothioate, phosphoramidate, carbamate, carbonate, phosphate triester, acetamidate, or carboxymethyl ester, or a combination thereof. In some embodiments, the modified internucleoside linkage comprises one or more phosphorothioate linkages. Benefits of the modified internucleoside linkage may include decreased toxicity or improved pharmacokinetics.

[0051] In some embodiments, the composition comprises an oligonucleotide that inhibits the expression of DKK2, wherein the oligonucleotide comprises a modified internucleoside linkage, wherein the oligonucleotide comprises 1, 2, 3, 4, 5, 6, 7, 8, 9, 10, 11, 12, 13, 14, 15, 16, 17, 18, 19, or 20 modified internucleoside linkages, or a range of modified internucleoside linkages defined by any two of the aforementioned numbers. In some embodiments, the oligonucleotide comprises no more than 18 modified internucleoside linkages. In some embodiments, the oligonucleotide comprises no more than 20 modified internucleoside linkages. In some embodiments, the oligonucleotide comprises 2 or more modified internucleoside linkages, 3 or more modified internucleoside linkages, 4 or more modified internucleoside linkages, 5 or more modified internucleoside linkages, 6 or more modified internucleoside linkages, 7 or more modified internucleoside linkages, 8 or more modified internucleoside linkages, 9 or more modified internucleoside linkages, 10 or more modified internucleoside linkages, 11 or more modified internucleoside linkages, 12 or more modified internucleoside linkages, 13 or more modified internucleoside linkages, 14 or more modified internucleoside linkages, 15 or more modified internucleoside linkages, 16 or more modified internucleoside linkages, 17 or more modified internucleoside linkages, 18 or more modified internucleoside linkages, 19 or more modified internucleoside linkages, or 20 or more modified internucleoside linkages.

[0052] In some embodiments, the composition comprises an oligonucleotide that inhibits the expression of DKK2, wherein the oligonucleotide comprises the modified nucleoside. In some embodiments, the modified nucleoside comprises a locked nucleic acid (LNA), hexitol nucleic acid (HLA), cyclohexene nucleic acid (CeNA), 2′-methoxyethyl, 2′-O-alkyl, 2′-O-allyl, 2′-fluoro, or 2′-deoxy, or a combination thereof. In some embodiments, the modified nucleoside comprises a LNA. In some embodiments, the modified nucleoside comprises a 2′,4′ constrained ethyl nucleic acid. In some embodiments, the modified nucleoside comprises HLA. In some embodiments, the modified nucleoside comprises CeNA. In some embodiments, the modified nucleoside comprises a 2′-methoxyethyl group. In some embodiments, the modified nucleoside comprises a 2′-O-alkyl group. In some embodiments, the modified nucleoside comprises a 2′-O-allyl group. In some embodiments, the modified nucleoside comprises a 2′-fluoro group. In some embodiments, the modified nucleoside comprises a 2′-deoxy group. In some embodiments, the modified nucleoside comprises a 2′-O-methyl nucleoside, 2′-deoxyfluoro nucleoside, 2′-O—N-methylacetamido (2′-O-NMA) nucleoside, a 2′-O-dimethylaminoethoxyethyl (2′-O-DMAEOE) nucleoside, 2′-O-aminopropyl (2′-O-AP) nucleoside, or 2′-ara-F, or a combination thereof. In some embodiments, the modified nucleoside comprises a 2′-O-methyl nucleoside. In some embodiments, the modified nucleoside comprises a 2′-deoxyfluoro nucleoside. In some embodiments, the modified nucleoside comprises a 2′-O-NMA nucleoside. In some embodiments, the modified nucleoside comprises a 2′-O-DMAEOE nucleoside. In some embodiments, the modified nucleoside comprises a 2′-O-aminopropyl (2′-O-AP) nucleoside. In some embodiments, the modified nucleoside comprises 2′-ara-F. In some embodiments, the modified nucleoside comprises one or more 2′fluoro modified nucleosides. In some embodiments, the modified nucleoside comprises a 2′ O-alkyl modified nucleoside. Benefits of the modified nucleoside may include decreased toxicity or improved pharmacokinetics.

[0053] In some embodiments, the oligonucleotide comprises 1, 2, 3, 4, 5, 6, 7, 8, 9, 10, 11, 12, 13, 14, 15, 16, 17, 18, 19, 20, or 21 modified nucleosides, or a range of nucleosides defined by any two of the aforementioned numbers. In some embodiments, the oligonucleotide comprises no more than 19 modified nucleosides. In some embodiments, the oligonucleotide comprises no more than 21 modified nucleosides. In some embodiments, the oligonucleotide comprises 2 or more modified nucleosides, 3 or more modified nucleosides, 4 or more modified nucleosides, 5 or more modified nucleosides, 6 or more modified nucleosides, 7 or more modified nucleosides, 8 or more modified nucleosides, 9 or more modified nucleosides, 10 or more modified nucleosides, 11 or more modified nucleosides, 12 or more modified nucleosides, 13 or more modified nucleosides, 14 or more modified nucleosides, 15 or more modified nucleosides, 16 or more modified nucleosides, 17 or more modified nucleosides, 18 or more modified nucleosides, 19 or more modified nucleosides, 20 or more modified nucleosides, or 21 or more modified nucleosides.

[0054] The oligonucleotide may include purines. Examples of purines include adenine (A) or guanine (G), or modified versions thereof. The oligonucleotide may include pyrimidines. Examples of pyrimidines include cytosine (C), thymine (T), or uracil (U), or modified versions thereof.

[0055] In some embodiments, purines of the oligonucleotide comprise 2′ fluoro modified purines. In some embodiments, purines of the oligonucleotide comprise 2′-O-methyl modified purines. In some embodiments, purines of the oligonucleotide comprise a mixture of 2′ fluoro and 2′-O-methyl modified purines. In some embodiments, all purines of the oligonucleotide comprise 2′ fluoro modified purines. In some embodiments, all purines of the oligonucleotide comprise 2′-O-methyl modified purines. In some embodiments, all purines of the oligonucleotide comprise a mixture of 2′ fluoro and 2′-O-methyl modified purines. 2′-O-methyl may include 2′ O-methyl.

[0056] In some embodiments, pyrimidines of the oligonucleotide comprise 2′ fluoro modified pyrimidines. In some embodiments, pyrimidines of the oligonucleotide comprise 2′-O-methyl modified pyrimidines. In some embodiments, pyrimidines of the oligonucleotide comprise a mixture of 2′ fluoro and 2′-O-methyl modified pyrimidines. In some embodiments, all pyrimidines of the oligonucleotide comprise 2′ fluoro modified pyrimidines. In some embodiments, all pyrimidines of the oligonucleotide comprise 2′-O-methyl modified pyrimidines. In some embodiments, all pyrimidines of the oligonucleotide comprise a mixture of 2′ fluoro and 2′-O-methyl modified pyrimidines.

[0057] In some embodiments, purines of the oligonucleotide comprise 2′ fluoro modified purines, and pyrimidines of the oligonucleotide comprise a mixture of 2′ fluoro and 2′-O-methyl modified pyrimidines. In some embodiments, purines of the oligonucleotide comprise 2′-O-methyl modified purines, and pyrimidines of the oligonucleotide comprise a mixture of 2′ fluoro and 2′-O-methyl modified pyrimidines. In some embodiments, purines of the oligonucleotide comprise 2′ fluoro modified purines, and pyrimidines of the oligonucleotide comprise 2′-O-methyl modified pyrimidines. In some embodiments, purines of the oligonucleotide comprise 2′-O-methyl modified purines, and pyrimidines of the oligonucleotide comprise 2′ fluoro modified pyrimidines. In some embodiments, pyrimidines of the oligonucleotide comprise 2′ fluoro modified pyrimidines, and purines of the oligonucleotide comprise a mixture of 2′ fluoro and 2′-O-methyl modified purines. In some embodiments, pyrimidines of the oligonucleotide comprise 2′-O-methyl modified pyrimidines, and purines of the oligonucleotide comprise a mixture of 2′ fluoro and 2′-O-methyl modified purines. In some embodiments, pyrimidines of the oligonucleotide comprise 2′ fluoro modified pyrimidines, and purines of the oligonucleotide comprise 2′-O-methyl modified purines. In some embodiments, pyrimidines of the oligonucleotide comprise 2′-O-methyl modified pyrimidines, and purines of the oligonucleotide comprise 2′ fluoro modified purines.

[0058] In some embodiments, all purines of the oligonucleotide comprise 2′ fluoro modified purines, and all pyrimidines of the oligonucleotide comprise a mixture of 2′ fluoro and 2′-O-methyl modified pyrimidines. In some embodiments, all purines of the oligonucleotide comprise 2′-O-methyl modified purines, and all pyrimidines of the oligonucleotide comprise a mixture of 2′ fluoro and 2′-O-methyl modified pyrimidines. In some embodiments, all purines of the oligonucleotide comprise 2′ fluoro modified purines, and all pyrimidines of the oligonucleotide comprise 2′-O-methyl modified pyrimidines. In some embodiments, all purines of the oligonucleotide comprise 2′-O-methyl modified purines, and all pyrimidines of the oligonucleotide comprise 2′ fluoro modified pyrimidines. In some embodiments, all pyrimidines of the oligonucleotide comprise 2′ fluoro modified pyrimidines, and all purines of the oligonucleotide comprise a mixture of 2′ fluoro and 2′-O-methyl modified purines. In some embodiments, all pyrimidines of the oligonucleotide comprise 2′-O-methyl modified pyrimidines, and all purines of the oligonucleotide comprise a mixture of 2′ fluoro and 2′-O-methyl modified purines. In some embodiments, all pyrimidines of the oligonucleotide comprise 2′ fluoro modified pyrimidines, and all purines of the oligonucleotide comprise 2′-O-methyl modified purines. In some embodiments, all pyrimidines of the oligonucleotide comprise 2′-O-methyl modified pyrimidines, and all purines of the oligonucleotide comprise 2′ fluoro modified purines.

[0059] In some cases, the oligonucleotide comprises a particular modification pattern. In some embodiments, position 9 counting from the 5′ end of the of a strand of the oligonucleotide may have a 2′F modification. In some embodiments, when position 9 of a strand of the oligonucleotide is a pyrimidine, then all purines in a strand of the oligonucleotide have a 2′OMe modification. In some embodiments, when position 9 is the only pyrimidine between positions 5 and 11 of the sense stand, then position 9 is the only position with a 2′F modification in a strand of the oligonucleotide. In some embodiments, when position 9 and only one other base between positions 5 and 11 of a strand of the oligonucleotide are pyrimidines, then both of these pyrimidines are the only two positions with a 2′F modification in a strand of the oligonucleotide. In some embodiments, when position 9 and only two other bases between positions 5 and 11 of a strand of the oligonucleotide are pyrimidines, and those two other pyrimidines are in adjacent positions so that there would be not three 2′F modifications in a row, then any combination of 2′F modifications can be made that give three 2′F modifications in total. In some embodiments, when there are more than 2 pyrimidines between positions 5 and 11 of a strand of the oligonucleotide, then all combinations of pyrimidines having the 2′F modification are allowed that have three to five 2′F modifications in total, provided that a strand of the oligonucleotide does not have three 2′F modifications in a row. In some cases, a strand of the oligonucleotide of any of the siRNAs comprises a modification pattern which conforms to any or all of these a strand of the oligonucleotide rules.

[0060] In some embodiments, when position 9 of a strand of the oligonucleotide is a purine, then all purines in a strand of the oligonucleotide have a 2′OMe modification. In some embodiments, when position 9 is the only purine between positions 5 and 11 of the sense stand, then position 9 is the only position with a 2′F modification in a strand of the oligonucleotide. In some embodiments, when position 9 and only one other base between positions 5 and 11 of a strand of the oligonucleotide are purines, then both of these purines are the only two positions with a 2′F modification in a strand of the oligonucleotide. In some embodiments, when position 9 and only two other bases between positions 5 and 11 of a strand of the oligonucleotide are purines, and those two other purines are in adjacent positions so that there would be not three 2′F modifications in a row, then any combination of 2′F modifications can be made that give three 2′F modifications in total. In some embodiments, when there are more than 2 purines between positions 5 and 11 of a strand of the oligonucleotide, then all combinations of purines having the 2′F modification are allowed that have three to five 2′F modifications in total, provided that a strand of the oligonucleotide does not have three 2′F modifications in a row. In some cases, a strand of the oligonucleotide of any of the siRNAs comprises a modification pattern which conforms to any or all of these a strand of the oligonucleotide rules.

[0061] In some cases, position 9 of a strand of the oligonucleotide can be a 2′deoxy. In these cases, 2′F and 2′OMe modifications may occur at the other positions of a strand of the oligonucleotide. In some cases, a strand of the oligonucleotide of any of the siRNAs comprises a modification pattern which conforms to these a strand of the oligonucleotide rules.

[0062] In some embodiments, position nine of the sense strand comprises a 2′ fluoro-modified pyrimidine. In some embodiments, all purines of the sense strand comprise 2′-O-methyl modified purines. In some embodiments, 1, 2, 3, 4, or 5 pyrimidines between positions 5 and 11 comprise a 2′flouro-modified pyrimidine, provided there are not three 2′ fluoro-modified pyrimidines in a row. In some embodiments, the odd-numbered positions of the antisense strand comprise 2′-O-methyl modified nucleotides. In some embodiments, the even-numbered positions of the antisense strand comprise 2′flouro-modified nucleotides and unmodified deoxyribonucleotide. In some embodiments, the even-numbered positions of the antisense strand comprise 2′flouro-modified nucleotides, 2′-O-methyl modified nucleotides and unmodified deoxyribonucleotide. In some embodiments, position nine of the sense strand comprises a 2′ fluoro-modified pyrimidine; all purines of the sense strand comprises 2′-O-methyl modified purines; 1, 2, 3, 4, or 5 pyrimidines between positions 5 and 11 comprise a 2′flouro-modified pyrimidine, provided there are not three 2′ fluoro-modified pyrimidines in a row; the odd-numbered positions of the antisense strand comprise 2′-O-methyl modified nucleotides; and the even-numbered positions of the antisense strand comprise 2′flouro-modified nucleotides and unmodified deoxyribonucleotides.

[0063] In some embodiments, position nine of the sense strand comprises a 2′ fluoro-modified purine. In some embodiments, all pyrimidines of the sense strand comprise 2′-O-methyl modified purines. In some embodiments, 1, 2, 3, 4, or 5 purines between positions 5 and 11 comprise a 2′flouro-modified purine, provided there are not three 2′ fluoro-modified purine in a row. In some embodiments, the odd-numbered positions of the antisense strand comprise 2′-O-methyl modified nucleotides. In some embodiments, the even-numbered positions of the antisense strand comprise 2′flouro-modified nucleotides and unmodified deoxyribonucleotide. In some embodiments, the even-numbered positions of the antisense strand comprise 2′flouro-modified nucleotides, 2′-O-methyl modified nucleotides and unmodified deoxyribonucleotide. In some embodiments, position nine of the sense strand comprises a 2′ fluoro-modified purine; all pyrimidine of the sense strand comprises 2′-O-methyl modified pyrimidines; 1, 2, 3, 4, or 5 purines between positions 5 and 11 comprise a 2′flouro-modified purines, provided there are not three 2′ fluoro-modified purines in a row; the odd-numbered positions of the antisense strand comprise 2′-O-methyl modified nucleotides; and the even-numbered positions of the antisense strand comprise 2′flouro-modified nucleotides and unmodified deoxyribonucleotides. In some embodiments, there are not three 2′ fluoro-modified purines in a row. In some embodiments, there are not three 2′ fluoro-modified pyrimidines in a row.

[0064] In some embodiments, position nine of the sense strand comprises an unmodified deoxyribonucleotide. In some embodiments, positions 5, 7, and 8 of the sense strand comprise 2′fluoro-modified nucleotides. In some embodiments, all pyrimidines in positions 10 to 21 of the sense strand comprise 2′-O-methyl modified pyrimidines and all purines in positions 10 to 21 of the comprise 2′-O-methyl modified purines or 2′fluoro-modified purines. In some embodiments, the odd-numbered positions of the antisense strand comprise 2′-O-methyl modified nucleotides. In some embodiments, the even-numbered positions of the antisense strand comprise 2′flouro-modified nucleotides and unmodified deoxyribonucleotides. In some embodiments, the even-numbered positions of the antisense strand comprise 2′flouro-modified nucleotides, 2′-O-methyl modified nucleotides and unmodified deoxyribonucleotides. In some embodiments, position nine of the sense strand comprises an unmodified deoxyribonucleotide; positions 5, 7, and 8 of the sense strand comprise 2′fluoro-modified nucleotides; all pyrimidines in positions 10 to 21 of the sense strand comprise 2′-O-methyl modified pyrimidines and all purines in positions 10 to 21 of the comprise 2′-O-methyl modified purines or 2′fluoro-modified purines; the odd-numbered positions of the antisense strand comprise 2′-O-methyl modified nucleotides; and the even-numbered positions of the antisense strand comprise 2′flouro-modified nucleotides and unmodified deoxyribonucleotides.

[0065] In some embodiments, position nine of the sense strand comprises an unmodified deoxyribonucleotide. In some embodiments, positions 5, 7, and 8 of the sense strand comprise 2′fluoro-modified nucleotides. In some embodiments, all purines in positions 10 to 21 of the sense strand comprise 2′-O-methyl modified purines and all pyrimidines in positions 10 to 21 of the comprise 2′-O-methyl modified pyrimidines or 2′fluoro-modified pyrimidines. In some embodiments, the odd-numbered positions of the antisense strand comprise 2′-O-methyl modified nucleotides. In some embodiments, the even-numbered positions of the antisense strand comprise 2′flouro-modified nucleotides and unmodified deoxyribonucleotides. In some embodiments, the even-numbered positions of the antisense strand comprise 2′flouro-modified nucleotides, 2′-O-methyl modified nucleotides and unmodified deoxyribonucleotides. In some embodiments, position nine of the sense strand comprises an unmodified deoxyribonucleotide; positions 5, 7, and 8 of the sense strand comprise 2′fluoro-modified nucleotides; all purines in positions 10 to 21 of the sense strand comprise 2′-O-methyl modified purines and all pyrimidines in positions 10 to 21 of the comprise 2′-O-methyl modified pyrimidines or 2′fluoro-modified pyrimidines; the odd-numbered positions of the antisense strand comprise 2′-O-methyl modified nucleotides; and the even-numbered positions of the antisense strand comprise 2′flouro-modified nucleotides and unmodified deoxyribonucleotide.

[0066] In some embodiments, the composition comprises an oligonucleotide that inhibits the expression of DKK2, wherein the oligonucleotide comprises a targeting ligand.

[0067] In some embodiments, the moiety includes a negatively charged group attached at a 5′ end of the oligonucleotide. This may be referred to as a 5′-end group. In some embodiments, the negatively charged group is attached at a 5′ end of an antisense strand of an siRNA disclosed herein. The 5′-end group may be or include a 5′-end phosphorothioate, 5′-end phosphorodithioate, 5′-end vinylphosphonate (5′-VP), 5′-end methylphosphonate, 5′-end cyclopropyl phosphonate, or a 5′-deoxy-5′-C-malonyl. The 5′-end group may comprise 5′-VP. In some embodiments, the 5′-VP comprises a trans-vinylphosphate or cis-vinylphosphate. The 5′-end group may include an extra 5′ phosphate. A combination of 5′-end groups may be used.

[0068] In some embodiments, the oligonucleotide includes a negatively charged group. The negatively charged group may aid in cell or tissue penetration. The negatively charged group may be attached at a 5′ or 3′ end (e.g. a 5′ end) of the oligonucleotide. This may be referred to as an end group. The end group may be or include a phosphorothioate, phosphorodithioate, vinylphosphonate, methylphosphonate, cyclopropyl phosphonate, or a deoxy-C-malonyl. The end group may include an extra 5′ phosphate such as an extra 5′ phosphate. A combination of end groups may be used.

[0069] In some embodiments, the oligonucleotide includes a phosphate mimic. In some embodiments, the phosphate mimic comprises vinyl phosphonate. In some embodiments, the vinyl phosphonate comprises a trans-vinylphosphate. In some embodiments, the vinyl phosphonate comprises a cis-vinylphosphate. An example of a nucleotide that includes a vinyl phosphonate is shown below.

[chemical structure]

[0070] In some embodiments, the vinyl phosphonate increases the stability of the oligonucleotide. In some embodiments, the vinyl phosphonate increases the accumulation of the oligonucleotide in tissues. In some embodiments, the vinyl phosphonate protects the oligonucleotide from an exonuclease or a phosphatase. In some embodiments, the vinyl phosphonate improves the binding affinity of the oligonucleotide with the siRNA processing machinery.

[0071] In some embodiments, the oligonucleotide includes 1 vinyl phosphonate. In some embodiments, the oligonucleotide includes 2 vinyl phosphonates. In some embodiments, the oligonucleotide includes 3 vinyl phosphonates. In some embodiments, the oligonucleotide includes 4 vinyl phosphonates. In some embodiments, the antisense strand of the oligonucleotide comprises a vinyl phosphonate at the 5′ end. In some embodiments, the antisense strand of the oligonucleotide comprises a vinyl phosphonate at the 3′ end. In some embodiments, the sense strand of the oligonucleotide comprises a vinyl phosphonate at the 5′ end. In some embodiments, the sense strand of the oligonucleotide comprises a vinyl phosphonate at the 3′ end.

### 1. Hydrophobic Moieties

[0072] In some embodiments, the composition comprises an oligonucleotide that inhibits the expression of DKK2, wherein the oligonucleotide comprises a hydrophobic moiety. The hydrophobic moiety may be attached at a 3′ or 5′ terminus of the oligonucleotide. The hydrophobic moiety may include a lipid such as a fatty acid. The hydrophobic moiety may include a hydrocarbon. The hydrocarbon may be linear. The hydrocarbon may be non-linear. The hydrophobic moiety may include a lipid moiety or a cholesterol moiety, or a combination thereof.

[0073] In some embodiments, the composition comprises an oligonucleotide that inhibits the expression of DKK2, wherein the oligonucleotide comprises a lipid attached at a 3′ or 5′ terminus of the oligonucleotide. In some embodiments, the lipid comprises cholesterol, myristoyl, palmitoyl, stearoyl, lithocholoyl, docosanoyl, docosahexaenoyl, myristyl, palmityl, stearyl, or α-tocopherol, or a combination thereof.

[0074] In some embodiments, the composition comprises an oligonucleotide that inhibits the expression of DKK2, wherein the oligonucleotide comprises a hydrophobic ligand or moiety. In some embodiments, the hydrophobic ligand or moiety comprises cholesterol. In some embodiments, the hydrophobic ligand or moiety comprises a cholesterol derivative. In some embodiments, the hydrophobic ligand or moiety is attached at a 3′ terminus of the oligonucleotide. In some embodiments, the hydrophobic ligand or moiety s attached at a 5′ terminus of the oligonucleotide. In some embodiments, the composition comprises a sense strand, and the hydrophobic ligand or moiety is attached to the sense strand (e.g. attached to a 5′ end of the sense strand, or attached to a 3′ end of the sense strand). In some embodiments, the composition comprises an antisense strand, and the hydrophobic ligand or moiety is attached to the antisense strand (e.g. attached to a 5′ end of the antisense strand, or attached to a 3′ end of the antisense strand). In some embodiments, the composition comprises a hydrophobic ligand or moiety attached at a 3′ or 5′ terminus of the oligonucleotide.

[0075] In some embodiments, a hydrophobic moiety is attached to the oligonucleotide (e.g. a sense strand and/or an antisense strand of a siRNA). In some embodiments, a hydrophobic moiety is attached at a 3′ terminus of the oligonucleotide. In some embodiments, a hydrophobic moiety is attached at a 5′ terminus of the oligonucleotide. In some embodiments, the hydrophobic moiety comprises cholesterol. In some embodiments, the hydrophobic moiety includes a cyclohexanyl.

[0076] In some embodiments, the composition comprises an oligonucleotide that inhibits the expression of DKK2, wherein the oligonucleotide comprises a lipid attached at a 3′ or 5′ terminus of the oligonucleotide. In some embodiments, a lipid is attached at a 3′ terminus of the oligonucleotide. In some embodiments, a lipid is attached at a 5′ terminus of the oligonucleotide. In some embodiments, the lipid comprises cholesterol, myristoyl, palmitoyl, stearoyl, lithocholoyl, docosanoyl, docosahexaenoyl, myristyl, palmityl, stearyl, or α-tocopherol, or a combination thereof. In some embodiments, the lipid comprises stearyl, lithocholyl, docosanyl, docosahexaenyl, or myristyl. In some embodiments, the lipid comprises cholesterol. In some embodiments, the lipid includes a sterol such as cholesterol. In some embodiments, the lipid comprises stearyl, t-butylphenol, n-butylphenol, octylphenol, dodecylphenol, phenyl n-dodecyl, octadecylbenzamide, hexadecylbenzamide, or octadecylcyclohexyl. In some embodiments, the lipid comprises phenyl para C12.

[0077] In some embodiments, the oligonucleotide comprises any aspect of the following structure:

[chemical structure]

In some embodiments, the oligonucleotide comprises any aspect of the following structure:

[chemical structure]

In some embodiments, the oligonucleotide comprises any aspect of the following structure:

[chemical structure]

In some embodiments, the oligonucleotide comprises any aspect of the following structure: The aspect included in the oligonucleotide may include the entire structure, or may include the lipid moiety, of any of the structures shown. In some embodiments, n is 1-3. In some embodiments, n is 1. In some embodiments, n is 2. In some embodiments, n is 3. In some embodiments, R is an alkyl group. In some embodiments, the alkyl group contains 1, 2, 3, 4, 5, 6, 7, 8, 9, 10, 11, 12, 13, 14, 15, 16, 17, 18, 19, or 20 carbons. In some embodiments, the alkyl group contains 4, 5, 6, 7, 8, 9, 10, 11, 12, 13, 14, 15, 16, 17, or 18 carbons, or a range defined by any two of the aforementioned numbers of carbons. In some embodiments, the alkyl group contains 4-18 carbons. In some embodiments, the lipid moiety comprises an alcohol or ether.

[0078] In some embodiments, the lipid includes a fatty acid. In some embodiments, the lipid comprises a lipid depicted in Table 1. The example lipid moieties in Table 1 are shown attached at a 5′ end of an oligonucleotide, in which the 5′ terminal phosphate of the oligonucleotide is shown with the lipid moiety. In some embodiments, a lipid moiety in Table 1 may be attached at a different point of attachment than shown. For example, the point of attachment of any of the lipid moieties in the table may be at a 3′ oligonucleotide end. In some embodiments, the lipid is used for targeting the oligonucleotide to a non-hepatic cell or tissue.

TABLE 1
Hydrophobic moiety examples

| Hydrophobic | | |
|---|---|---|
| Moiety | Hydrophobic | |
| Description | Moiety Name | Example Conjugation |
| cholesterol-TEG | ETL2 | [chemical structure] |
| stearyl | ETL3 | [chemical structure] |
| t-butylphenyl | ETL7 | [chemical structure] |
| n-butylphenyl | ETL8 | [chemical structure] |
| octylphenyl | ETL9 | [chemical structure] |
| dodecylphenyl | ETL10 | [chemical structure] |
| phenyl n-dodecyl | ETL12 | [chemical structure] |
| octadecyl- benzamide | ETL13 | [chemical structure] |
| hexadecyl- benzamide | ETL15 | [chemical structure] |
| octadecyl- cyclohexyl | ETL16 | [chemical structure] |

[0079] In some embodiments, the lipid or lipid moiety includes 16 to 18 carbons. In some embodiments, the lipid includes 16 carbons. In some embodiments, the lipid includes 17 carbons. In some embodiments, the lipid includes 18 carbons. In some embodiments, the lipid moiety includes 16 carbons. In some embodiments, the lipid moiety includes 17 carbons. In some embodiments, the lipid moiety includes 18 carbons.

[0080] The hydrophobic moiety may include a linker that comprises a carbocycle. The carbocycle may be six-membered. Some examples of a carbocycle include phenyl or cyclohexyl. The linker may include a phenyl. The linker may include a cyclohexyl. The lipid may be attached to the carbocycle, which may in turn be attached at a phosphate (e.g. 5′ or 3′ phosphate) of the oligonucleotide. In some embodiments, the lipid or hydrocarbon, and the end of the sense are connected to the phenyl or cyclohexyl linker in the 1,4; 1,3; or 1,2 substitution pattern (e.g. the para, meta, or ortho phenyl configuration). In some embodiments, the lipid or hydrocarbon, and the end of the sense are connected to the phenyl or cyclohexyl linker in the 1,4 substitution pattern (e.g. the para phenyl configuration). The lipid may be attached to the carbocycle in the 1,4 substitution pattern relative to the oligonucleotide. The lipid may be attached to the carbocycle in the 1,3 substitution pattern relative to the oligonucleotide. The lipid may be attached to the carbocycle in the 1,2 substitution pattern relative to the oligonucleotide. The lipid may be attached to the carbocycle in the ortho orientation relative to the oligonucleotide. The lipid may be attached to the carbocycle in the para orientation relative to the oligonucleotide. The lipid may be attached to the carbocycle in the meta orientation relative to the oligonucleotide.

[0081] The lipid moiety may comprise or consist of the following structure

[chemical structure]

In some embodiments, the lipid moiety comprises or consists of the following structure:

[chemical structure]

In some embodiments, the lipid moiety comprises the following structure:

[chemical structure]

In some embodiments, the lipid moiety comprises or consist of the following structure:

[chemical structure]

In some embodiments, the dotted line indicates a covalent connection. The covalent connection may between an end of the sense or antisense strand. For example, the connection may be to the 5′ end of the sense strand. In some embodiments, n is 0-3. In some embodiments, n is 1-3. In some embodiments, n is 0. In some embodiments, n is 1. In some embodiments, n is 2. In some embodiments, n is 3. In some embodiments, n is 4. In some embodiments, n is 5. In some embodiments, n is 1, 2, 3, 4, 5, 6, 7, 8, 9, or 10. In some embodiments, R is an alkyl group. In some embodiments, the alkyl group contains 1, 2, 3, 4, 5, 6, 7, 8, 9, 10, 11, 12, 13, 14, 15, 16, 17, 18, 19, or 20 carbons. In some embodiments, the alkyl group contains 4, 5, 6, 7, 8, 9, 10, 11, 12, 13, 14, 15, 16, 17, or 18 carbons, or a range defined by any two of the aforementioned numbers of carbons. In some embodiments, R comprises or consists of an alkyl group containing 4-18 carbons.

[0082] The lipid moiety may be attached at a 5′ end of the oligonucleotide. The 5′ end may have one phosphate linking the lipid moiety to a 5′ carbon of a sugar of the oligonucleotide. The 5′ end may have two phosphates linking the lipid moiety to a 5′ carbon of a sugar of the oligonucleotide. The 5′ end may have three phosphates linking the lipid moiety to a 5′ carbon of a sugar of the oligonucleotide. The 5′ end may have one phosphate connected to the 5′ carbon of a sugar of the oligonucleotide, where the one phosphate is connected to the lipid moiety. The 5′ end may have two phosphates connected to the 5′ carbon of a sugar of the oligonucleotide, where the one of the two phosphates is connected to the lipid moiety. The 5′ end may have three phosphates connected to the 5′ carbon of a sugar of the oligonucleotide, where the one of the three phosphates is connected to the lipid moiety. The sugar may include a ribose. The sugar may include a deoxyribose. The sugar may be modified a such as a 2′ modified sugar (e.g. a 2′ O-methyl or 2′ fluoro ribose). A phosphate of the 5′ end may include a modification such as a sulfur in place of an oxygen. Two phosphates of the 5′ end may include a modification such as a sulfur in place of an oxygen. Three phosphates of the 5′ end may include a modification such as a sulfur in place of an oxygen.

[0083] In some embodiments, the oligonucleotide includes 1 lipid moiety. In some embodiments, the oligonucleotide includes 2 lipid moieties. In some embodiments, the oligonucleotide includes 3 lipid moieties. In some embodiments, the oligonucleotide includes 4 lipid moieties.

[0084] Some embodiments relate to a method of making an oligonucleotide comprising a hydrophobic conjugate. A strategy for making hydrophobic conjugates may include use of a phosphoramidite reagent based upon a 6-membered ring alcohol such as a phenol or cyclohexanol. The phosphoramidite may be reacted to a nucleotide to connect the nucleotide to the hydrophobic moiety, and thereby produce the hydrophobic conjugate. Some examples of phosphoramidite reagents that may be used to produce a hydrophobic conjugate are provided as follows:

[chemical structure]

In some embodiments, n is 1-3. In some embodiments, n is 1. In some embodiments, n is 2. In some embodiments, n is 3. In some embodiments, R is an alkyl group. In some embodiments, the alkyl group contains 1, 2, 3, 4, 5, 6, 7, 8, 9, 10, 11, 12, 13, 14, 15, 16, 17, 18, 19, or 20 carbons. In some embodiments, the alkyl group contains 4, 5, 6, 7, 8, 9, 10, 11, 12, 13, 14, 15, 16, 17, or 18 carbons, or a range defined by any two of the aforementioned numbers of carbons. In some embodiments, R comprises or consists of an alkyl group containing 4-18 carbons. Any one of the phosphoramidite reagents may be reacted to a 5′ end of an oligonucleotide to produce an oligonucleotide comprising a hydrophobic moiety. In some embodiments, the phosphoramidite reagents is reacted to a 5′ end of a sense strand of an siRNA. The sense strand may then be hybridized to an antisense strand to form a duplex. The hybridization may be performed by incubating the sense and antisense strands in solution at a given temperature. The temperature may be gradually reduced. The temperature may comprise or include a temperature comprising an annealing temperature for the sense and antisense strands. The temperature may be below or include a temperature below the annealing temperature for the sense and antisense strands. The temperature may be below a melting temperature of the sense and antisense strands.

[0085] The lipid may be attached to the oligonucleotide by a linker. The linker may include a polyethyleneglycol (e.g. tetraethyleneglycol).

[0086] The modifications described herein may be useful for delivery to a cell or tissue, for example, extrahepatic delivery or targeting of an oligonucleotide composition. The modifications described herein may be useful for targeting an oligonucleotide composition to a cell or tissue.

[0087] ETL2 may be conjugated to an oligonucleotide using the following reagent:

[chemical structure]

### 2. Sugar Moieties

[0088] In some embodiments, the composition comprises an oligonucleotide that inhibits the expression of DKK2, wherein the oligonucleotide comprises a sugar moiety. The sugar moiety may include an N-acetyl galactose moiety (e.g. an N-acetylgalactosamine (GalNAc) moiety), an N-acetyl glucose moiety (e.g. an N-acetylglucosamine (GlcNAc) moiety), a fucose moiety, or a mannose moiety. The sugar moiety may include 1, 2, 3, or more sugar molecules. The sugar moiety may be attached at a 3′ or 5′ terminus of the oligonucleotide. The sugar moiety may include an N-acetyl galactose moiety. The sugar moiety may include an N-acetylgalactosamine (GalNAc) moiety. The sugar moiety may include an N-acetyl glucose moiety. The sugar moiety may include N-acetylglucosamine (GlcNAc) moiety. The sugar moiety may include a fucose moiety. The sugar moiety may include a mannose moiety. N-acetyl glucose, GlcNAc, fucose, or mannose may be useful for targeting macrophages when they target or bind a mannose receptor such as CD206. The sugar moiety may be useful for binding or targeting an asialoglycoprotein receptor such as an asialoglycoprotein receptor of a hepatocyte. The GalNAc moiety may bind to an asialoglycoprotein receptor. The GalNAc moiety may target a hepatocyte.

[0089] In some embodiments, the composition comprises an oligonucleotide that inhibits the expression of DKK2, wherein the oligonucleotide comprises an N-acetylgalactosamine (GalNAc) moiety. GalNAc may be useful for hepatocyte targeting. The GalNAc moiety may include a bivalent or trivalent branched linker. The oligo may be attached to 1, 2 or 3 GalNAcs through a bivalent or trivalent branched linker. The GalNAc moiety may include 1, 2, 3, or more GalNAc molecules. The GalNAc moiety may be attached at a 3′ or 5′ terminus of the oligonucleotide.

[0090] In some embodiments, the composition comprises an oligonucleotide that inhibits the expression of DKK2, wherein the oligonucleotide comprises an N-acetylgalactosamine (GalNAc) ligand for hepatocyte targeting. In some embodiments, the composition comprises GalNAc. In some embodiments, the composition comprises a GalNAc derivative. In some embodiments, the GalNAc ligand is attached at a 3′ terminus of the oligonucleotide. In some embodiments, the GalNAc ligand is attached at a 5′ terminus of the oligonucleotide. In some embodiments, the composition comprises a sense strand, and the GalNAc ligand is attached to the sense strand (e.g. attached to a 5′ end of the sense strand, or attached to a 3′ end of the sense strand). In some embodiments, the composition comprises an antisense strand, and the GalNAc ligand is attached to the antisense strand (e.g. attached to a 5′ end of the antisense strand, or attached to a 3′ end of the antisense strand). In some embodiments, the composition comprises a GalNAc ligand attached at a 3′ or 5′ terminus of the oligonucleotide.

[0091] Disclosed herein, in some embodiments, are compositions comprising an oligonucleotide that inhibits the expression of DKK2, wherein the oligonucleotide comprises a GalNAc moiety. The GalNAc moiety may be included in any formula, structure, or GalNAc moiety shown below. In some embodiments, described herein is a compound (e.g. oligonucleotide) represented by Formula (I) or (II):

[chemical structure]

or a salt thereof, wherein
[0092] J is an oligonucleotide;
[0093] each w is independently selected from any value from 1 to 20;
[0094] each v is independently selected from any value from 1 to 20;
[0095] n is selected from any value from 1 to 20;
[0096] m is selected from any value from 1 to 20;
[0097] z is selected from any value from 1 to 3, wherein
   [0098] if z is 3, Y is C
   [0099] if z is 2, Y is CR⁶, or
   [0100] if z is 1, Y is C(R⁶)₂;
[0101] Q is selected from:
   [0102] C₃₋₁₀ carbocycle optionally substituted with one or more substituents independently selected from halogen, —CN, —NO₂, —OR⁷, —SR⁷, —N(R⁷)₂, —C(O)R⁷, —C(O)N(R⁷)₂, —N(R⁷)C(O)R⁷, —N(R⁷)C(O)N(R⁷)₂, —OC(O)N(R⁷)₂, —N(R⁷)C(O)OR⁷, —C(O)OR⁷, —OC(O)R⁷, —S(O)R⁷, and C₁₋₆ alkyl, wherein the C₁₋₆ alkyl, is optionally substituted with one or more substituents independently selected from halogen, —CN, —OH, —SH, —NO₂, and —NH₂;
[0103] R¹ is a linker selected from:
   [0104] —O—, —S—, —N(R⁷)—, —C(O)—, —C(O)N(R⁷)—, —N(R⁷)C(O)—, —N(R⁷)C(O)N(R⁷)—, —OC(O)N(R⁷)—, —N(R⁷)C(O)O—, —C(O)O—, —OC(O)—, —S(O)—, —S(O)₂—, —OS(O)₂—, —OP(O)(OR⁷)O—, —SP(O)(OR⁷)O—, —OP(S)(OR⁷)O—, —OP(O)(SR⁷)O—, —OP(O)(OR⁷)S—, —OP(O)(O⁻)O—, —SP(O)(O⁻)O—, —OP(S)(O⁻)O—, —OP(O)(S⁻)O—, —OP(O)(O⁻)S—, —OP(O)(OR⁷)NR⁷—, —OP(O)(N(R⁷)₂)NR⁷—, —OP(OR⁷)O—, —OP(N(R⁷)₂)O—, —OP(OR⁷)N(R⁷)—, and —OPN(R⁷)₂NR⁷—;
[0105] each R² is independently selected from:
   [0106] C₁₋₆ alkyl optionally substituted with one or more substituents independently selected from halogen, —OR⁷, —SR⁷, —N(R⁷)₂, —C(O)R⁷, —C(O)N(R⁷)₂, —N(R⁷)C(O)R⁷, —N(R⁷)C(O)N(R⁷)₂, —OC(O)N(R⁷)₂, —N(R⁷)C(O)OR⁷, —C(O)OR⁷, —OC(O)R⁷, and —S(O)R⁷;
[0107] R³ and R⁴ are each independently selected from:
   [0108] —OR⁷, —SR⁷, —N(R⁷)₂, —C(O)R⁷, —C(O)N(R⁷)₂, —N(R⁷)C(O)R⁷, —N(R⁷)C(O)N(R⁷)₂, —OC(O)N(R⁷)₂, —N(R⁷)C(O)OR⁷, —C(O)OR⁷, —OC(O)R⁷, and —S(O)R⁷;
[0109] each R⁵ is independently selected from:
   [0110] —OC(O)R⁷, —OC(O)N(R⁷)₂, —N(R⁷)C(O)R⁷, —N(R⁷)C(O)N(R⁷)₂, —N(R⁷)C(O)OR⁷, —C(O)R⁷, —C(O)OR⁷, and —C(O)N(R⁷)₂;
[0111] each R⁶ is independently selected from:
   [0112] hydrogen;
   [0113] halogen, —CN, —NO₂, —OR⁷, —SR⁷, —N(R⁷)₂, —C(O)R⁷, —C(O)N(R⁷)₂, —N(R⁷)C(O)R⁷, —N(R⁷)C(O)N(R⁷)₂, —OC(O)N(R⁷)₂, —N(R⁷)C(O)OR⁷, —C(O)OR⁷, —OC(O)R⁷, and —S(O)R⁷; and
   [0114] C₁₋₆ alkyl optionally substituted with one or more substituents independently selected from halogen, —CN, —NO₂, —OR⁷, —SR⁷, —N(R⁷)₂, —C(O)R⁷, —C(O)N(R⁷)₂, —N(R⁷)C(O)R⁷, —N(R⁷)C(O)N(R⁷)₂, —OC(O)N(R⁷)₂, —N(R⁷)C(O)OR⁷, —C(O)OR⁷, —OC(O)R⁷, and —S(O)R⁷;
[0115] each R⁷ is independently selected from:
   [0116] hydrogen;
   [0117] C₁₋₆ alkyl, C₂₋₆ alkenyl, and C₂₋₆ alkynyl, each of which is optionally substituted with one or more substituents independently selected from halogen, —CN, —OH, —SH, —NO₂, —NH₂, ═O, ═S, —O—C₁₋₆ alkyl, —S—C₁₋₆ alkyl, —N(C₁₋₆ alkyl)₂, —NH(C₁₋₆ alkyl), C₃₋₁₀ carbocycle, and 3- to 10-membered heterocycle; and
   [0118] C₃₋₁₀ carbocycle, and 3- to 10-membered heterocycle, each of which is optionally substituted with one or more substituents independently selected from halogen, —CN, —OH, —SH, —NO₂, —NH₂, ═O, ═S, —O—C₁₋₆ alkyl, —S—C₁₋₆ alkyl, —N(C₁₋₆ alkyl)₂, —NH(C₁₋₆ alkyl), C₁₋₆ alkyl, C₂₋₆ alkenyl, C₂₋₆ alkynyl, C₃₋₁₀carbocycle, 3- to 10-membered heterocycle, and C₁₋₆haloalkyl.
      In some embodiments, each w is independently selected from any value from 1 to 10. In some embodiments, each w is independently selected from any value from 1 to 5. In some embodiments, each w is 1. In some embodiments, each v is independently selected from any value from 1 to 10. In some embodiments, each v is independently selected from any value from 1 to 5. In some embodiments, each v is 1. In some embodiments, n is selected from any value from 1 to 10. In some embodiments, n is selected from any value from 1 to 5. In some embodiments, n is 2. In some embodiments, m is selected from any value from 1 to 10. In some embodiments, m is selected from any value from 1 to 5. In some embodiments, m is selected from 1 and 2. In some embodiments, z is 3 and Y is C. In some embodiments, Q is selected from C₅₋₆ carbocycle optionally substituted with one or more substituents independently selected from halogen, —CN, —NO₂, —OR⁷, —SR⁷, —N(R⁷)₂, —C(O)R⁷, —C(O)N(R⁷)₂, —N(R⁷)C(O)R⁷, —N(R⁷)C(O)N(R⁷)₂, —OC(O)N(R⁷)₂, —N(R⁷)C(O)OR⁷, —C(O)OR⁷, —OC(O)R⁷, and —S(O)R⁷. In some embodiments, Q is selected from C₅₋₆ carbocycle optionally substituted with one or more substituents independently selected from halogen, —CN, —OH, —SH, —NO₂, and —NH₂. In some embodiments, Q is selected from phenyl and cyclohexyl, each of which is optionally substituted with one or more substituents independently selected from halogen, —CN, —OH, —SH, —NO₂, and —NH₂. In some embodiments, Q is selected from phenyl. In some embodiments, Q is selected from cyclohexyl. In some embodiments, R¹ is selected from —OP(O)(OR⁷)O—, —SP(O)(OR⁷)O—, —OP(S)(OR⁷)O—, —OP(O)(SR⁷)O—, —OP(O)(OR⁷)S—, —OP(O)(O⁻)O—, —SP(O)(O⁻)O—, —OP(S)(O⁻)O—, —OP(O)(S⁻)O—, —OP(O)(O⁻)S—, —OP(O)(OR⁷)NR⁷—, —OP(O)(N(R⁷)₂)NR⁷—, —OP(OR⁷)O—, —OP(N(R⁷)₂)O—, —OP(OR⁷)N(R⁷)—, and —OPN(R⁷)₂NR⁷. In some embodiments, R¹ is selected from —OP(O)(OR⁷)O—, —SP(O)(OR⁷)O—, —OP(S)(OR⁷)O—, —OP(O)(SR⁷)O—, —OP(O)(OR⁷)S—, —OP(O)(O⁻)O—, —SP(O)(O⁻)O—, —OP(S)(O⁻)O—, —OP(O)(S⁻)O—, —OP(O)(O⁻)S—, and —OP(OR⁷)O—. In some embodiments, R¹ is selected from —OP(O)(OR⁷)O—, —OP(S)(OR⁷)O—, —OP(O)(O⁻)O—, —OP(S)(O⁻)O—, —OP(O)(S⁻)O—, and —OP(OR⁷)O—. In some embodiments, R¹ is selected from —OP(O)(OR⁷)O— and —OP(OR⁷)O—. In some embodiments, R² is selected from C₁₋₃ alkyl substituted with one or more substituents independently selected from halogen, —OR⁷, —OC(O)R⁷, —SR⁷, —N(R⁷)₂, —C(O)R⁷, and —S(O)R⁷. In some embodiments, R² is selected from C₁₋₃ alkyl substituted with one or more substituents independently selected from —OR⁷, —OC(O)R⁷, —SR⁷, and —N(R⁷)₂. In some embodiments, R² is selected from C₁₋₃ alkyl substituted with one or more substituents independently selected from —OR⁷ and —OC(O)R⁷. In some embodiments, R³ is selected from halogen, —OR⁷, —SR⁷, —N(R⁷)₂, —C(O)R⁷, —OC(O)R⁷, and —S(O)R⁷. In some embodiments, R³ is selected from —OR⁷, —SR⁷, —OC(O)R⁷, and —N(R⁷)₂. In some embodiments, R³ is selected from —OR⁷— and —OC(O)R⁷. In some embodiments, R⁴ is selected from halogen, —OR⁷, —SR⁷, —N(R⁷)₂, —C(O)R⁷, —OC(O)R⁷, and —S(O)R⁷. In some embodiments, R⁴ is selected from —OR⁷—SR⁷, —OC(O)R⁷, and —N(R⁷)₂. In some embodiments, R⁴ is selected from —OR⁷— and —OC(O)R⁷. In some embodiments, R⁵ is selected from —OC(O)R⁷, —OC(O)N(R⁷)₂, —N(R⁷)C(O)R⁷, —N(R⁷)C(O)N(R⁷)₂, and —N(R⁷)C(O)OR⁷. In some embodiments, R⁵ is selected from —OC(O)R⁷ and —N(R⁷)C(O)R⁷. In some embodiments, each R⁷ is independently selected from: hydrogen; and C₁₋₆ alkyl optionally substituted with one or more substituents independently selected from halogen, —CN, —OH, —SH, —NO₂, —NH₂, ═O, ═S, —O—C₁₋₆ alkyl, —S—C₁₋₆ alkyl, —N(C₁₋₆ alkyl)₂, —NH(C₁₋₆ alkyl), C₃₋₁₀ carbocycle, or 3- to 10-membered heterocycle. In some embodiments, each R⁷ is independently selected from C₁₋₆ alkyl optionally substituted with one or more substituents independently selected from halogen, —CN, —OH, —SH, —NO₂, —NH₂, ═O, ═S, —O—C₁₋₆ alkyl, —S—C₁₋₆ alkyl, —N(C₁₋₆ alkyl)₂, and —NH(C₁₋₆ alkyl). In some embodiments, each R⁷ is independently selected from C₁₋₆ alkyl optionally substituted with one or more substituents independently selected from halogen, —CN, —OH, and —SH. In some embodiments, w is 1; v is 1; n is 2; m is 1 or 2; z is 3 and Y is C; Q is phenyl or cyclohexyl, each of which is optionally substituted with one or more substituents independently selected from halogen, —CN, —OH, —SH, —NO₂, —NH₂, and C₁₋₃ alkyl; R¹ is selected from —OP(O)(OR⁷)O—, —OP(S)(OR⁷)O—, —OP(O)(O—)O—, —OP(S)(O—)O—, —OP(O)(S⁻)O—, and —OP(OR⁷)O—; R² is C₁ alkyl substituted with —OH or —OC(O)CH₃;
[0119] R³ is —OH or —OC(O)CH₃; R⁴ is —OH or —OC(O)CH₃; and Rt is —NH(O)CH₃. In some embodiments, the compound comprises:

[chemical structure]

[chemical structure]

[chemical structure]

[chemical structure]

[chemical structure]

[chemical structure]

[chemical structure]

[chemical structure]

[chemical structure]

[chemical structure]

[chemical structure]

[chemical structure]

[chemical structure]

[chemical structure]

[chemical structure]

[chemical structure]

In some embodiments, the oligonucleotide (J) is attached at a 5′ end or a 3′ end of the oligonucleotide. In some embodiments, the oligonucleotide comprises DNA. In some embodiments, the oligonucleotide comprises RNA. In some embodiments, the oligonucleotide comprises one or more modified internucleoside linkages. In some embodiments, the one or more modified internucleoside linkages comprise alkylphosphonate, phosphorothioate, methylphosphonate, phosphorodithioate, alkylphosphonothioate, phosphoramidate, carbamate, carbonate, phosphate triester, acetamidate, or carboxymethyl ester, or a combination thereof. In some embodiments, the oligonucleotide comprises 1, 2, 3, 4, 5, 6, 7, 8, 9, 10, 11, 12, 13, 14, 15, 16, 17, 18, 19, or 20 modified internucleoside linkages. In some embodiments, the compound binds to an asialoglycoprotein receptor. In some embodiments, the compound targets a hepatocyte.

[0120] Some embodiments include the following, where J is the oligonucleotide:

[chemical structure]

J may include one or more additional phosphates, or one or more phosphorothioates linking to the oligonucleotide. J may include one or more additional phosphates linking to the oligonucleotide. J may include one or more phosphorothioates linking to the oligonucleotide.

[0121] Some embodiments include the following, where J is the oligonucleotide:

[chemical structure]

J may include one or more additional phosphates, or one or more phosphorothioates linking to the oligonucleotide. J may include one or more additional phosphates linking to the oligonucleotide. J may include one or more phosphorothioates linking to the oligonucleotide.

[0122] Some embodiments include the following, where J is the oligonucleotide:

[chemical structure]

J may include one or more phosphates or phosphorothioates linking to the oligonucleotide. J may include one or more phosphates linking to the oligonucleotide. J may include a phosphate linking to the oligonucleotide. J may include one or more phosphorothioates linking to the oligonucleotide. J may include a phosphorothioate linking to the oligonucleotide.

[0123] Some embodiments include the following, where J is the oligonucleotide:

[chemical structure]

The structure in this compound attached to the oligonucleotide (J) may be referred to as “ETL17,” and is an example of a GalNAc moiety. J may include one or more phosphates or phosphorothioates linking to the oligonucleotide. J may include one or more phosphates linking to the oligonucleotide. J may include a phosphate linking to the oligonucleotide. J may include one or more phosphorothioates linking to the oligonucleotide. J may include a phosphorothioate linking to the oligonucleotide.

[0124] Some embodiments include the following, where the phosphate or “5′” indicates a connection to the oligonucleotide:

[chemical structure]

[0125] Some embodiments include the following, where the phosphate or “5′” indicates a connection to the oligonucleotide:

[chemical structure]

[0126] Some embodiments include the following, where J is the oligonucleotide:

[chemical structure]

include one or more phosphates or phosphorothioates linking to the oligonucleotide. J may include one or more phosphates linking to the oligonucleotide. J may include a phosphate linking to the oligonucleotide. J may include one or more phosphorothioates linking to the oligonucleotide. J may include a phosphorothioate linking to the oligonucleotide.

[0127] Some embodiments include the following, where J is the oligonucleotide:

[chemical structure]

[0128] The structure in this compound attached to the oligonucleotide (J) may be referred to as “ETL1,” and is an example of a GalNAc moiety. J may include one or more phosphates or phosphorothioates linking to the oligonucleotide. J may include one or more phosphates linking to the oligonucleotide. J may include a phosphate linking to the oligonucleotide. J may include one or more phosphorothioates linking to the oligonucleotide. J may include a phosphorothioate linking to the oligonucleotide.

3. siRNA Modification Patterns

[0129] In some embodiments, the composition comprises an oligonucleotide that inhibits the expression of DKK2 wherein the oligonucleotide comprises an siRNA comprising a sense strand and an antisense strand, wherein the sense strand comprises modification pattern 1S: 5′-NfsnsNfnNfnNfNfNfnNfnNfnNfnNfnNfsnsn-3′ (SEQ ID NO: 7600), wherein “Nf” is a 2′ fluoro-modified nucleoside, “n” is a 2′ O-methyl modified nucleoside, and “s” is a phosphorothioate linkage. In some embodiments, the sense strand comprises modification pattern 2S: 5′-nsnsnnNfnNfNfNfnnnnnnnnnnsnsn-3′ (SEQ ID NO: 7601), wherein “Nf” is a 2′ fluoro-modified nucleoside, “n” is a 2′ O-methyl modified nucleoside, and “s” is a phosphorothioate linkage. In some embodiments, the sense strand comprises modification pattern 3S: 5′-nsnsnnNfnNfnNfnnnnnnnnnnsnsn-3′ (SEQ ID NO: 7602), wherein “Nf” is a 2′ fluoro-modified nucleoside, “n” is a 2′ O-methyl modified nucleoside, and “s” is a phosphorothioate linkage. In some embodiments, the sense strand comprises modification pattern 4S: 5′-NfsnsNfnNfnNfNfNfnNfnNfnNfnNfnNfsnsnN-moiety-3′ (SEQ ID NO: 7603), wherein “Nf” is a 2′ fluoro-modified nucleoside, “n” is a 2′ O-methyl modified nucleoside, “s” is a phosphorothioate linkage, and N comprises one or more nucleosides. In some embodiments, the sense strand comprises modification pattern 5S: 5′-nsnsnnNfnNfNfNfnnnnnnnnnnsnsnN-moiety-3′ (SEQ ID NO: 7604), wherein “Nf” is a 2′ fluoro-modified nucleoside, “n” is a 2′ O-methyl modified nucleoside, “s” is a phosphorothioate linkage, and N comprises one or more nucleosides. The moiety may include any moiety such as a lipid moiety. In some embodiments, the sense strand comprises modification pattern 6S: 5′-nnnnNfNfnnNfNfnnnnnnnnnsnsn-3′ (SEQ ID NO: 7605), wherein “Nf” is a 2′ fluoro-modified nucleoside, “n” is a 2′ O-methyl modified nucleoside, “s” is a phosphorothioate linkage, and N comprises one or more nucleosides. In some embodiments, the sense strand comprises modification pattern 7S: 5′-nnnnnnNfNfNfNfnnnnnnnnnsnsn-3′ (SEQ ID NO: 7606), wherein “Nf” is a 2′ fluoro-modified nucleoside, “n” is a 2′ O-methyl modified nucleoside, “s” is a phosphorothioate linkage, and N comprises one or more nucleosides. In some embodiments, the sense strand comprises modification pattern 8S: 5′-nnnnnNfNfNfNfnnnnnnnnnnsnsn-3′ (SEQ ID NO: 7607), wherein “Nf” is a 2′ fluoro-modified nucleoside, “n” is a 2′ O-methyl modified nucleoside, “s” is a phosphorothioate linkage, and N comprises one or more nucleosides. In some embodiments, the sense strand comprises modification pattern 9S: 5′-nnnnnnNfnNfNfnnnnnnnnnsnsn-3′ (SEQ ID NO: 7608), wherein “Nf” is a 2′ fluoro-modified nucleoside, “n” is a 2′ O-methyl modified nucleoside, “s” is a phosphorothioate linkage, and N comprises one or more nucleosides. In some embodiments, the sense strand comprises modification pattern 10S: 5′-nnnnnnnNfNfnNfnnnnnnnnsnsn-3′ (SEQ ID NO: 7609), wherein “Nf” is a 2′ fluoro-modified nucleoside, “n” is a 2′ O-methyl modified nucleoside, “s” is a phosphorothioate linkage, and N comprises one or more nucleosides. In some embodiments, the sense strand comprises modification pattern 11S: 5′-nnnnnNfnnNfnnnnnnnnnnsnsn-3′ (SEQ ID NO: 7610), wherein “Nf” is a 2′ fluoro-modified nucleoside, “n” is a 2′ O-methyl modified nucleoside, “s” is a phosphorothioate linkage, and N comprises one or more nucleosides. In some embodiments, the sense strand comprises modification pattern 12S: 5′-nnnnNfNfnNfNfnnnnnnnnnnsnsn-3′ (SEQ ID NO: 7611), wherein “Nf” is a 2′ fluoro-modified nucleoside, “n” is a 2′ O-methyl modified nucleoside, “s” is a phosphorothioate linkage, and N comprises one or more nucleosides. In some embodiments, the sense strand comprises modification pattern 13S: 5′-nnnnNfnnnNfNfnnnnnnnnnsnsn-3′ (SEQ ID NO: 7612), wherein “Nf” is a 2′ fluoro-modified nucleoside, “n” is a 2′ O-methyl modified nucleoside, “s” is a phosphorothioate linkage, and N comprises one or more nucleosides. In some embodiments, the sense strand comprises modification pattern 14S: 5′-nnnnNfnnNfNfnnnnnnnnnnsnsn-3′ (SEQ ID NO: 7613), wherein “Nf” is a 2′ fluoro-modified nucleoside, “n” is a 2′ O-methyl modified nucleoside, “s” is a phosphorothioate linkage, and N comprises one or more nucleosides. In some embodiments, the sense strand comprises modification pattern 15S: 5′-nnnnnNfNfNfNfNfnnnnnnnnnsnsn-3′ (SEQ ID NO: 7614), wherein “Nf” is a 2′ fluoro-modified nucleoside, “n” is a 2′ O-methyl modified nucleoside, “s” is a phosphorothioate linkage, and N comprises one or more nucleosides. In some embodiments, the sense strand comprises modification pattern 16S: 5′-nnnnNfNfnnNfnNfnnnnnnnnsnsn-3′ (SEQ ID NO: 7615), wherein “Nf” is a 2′ fluoro-modified nucleoside, “n” is a 2′ O-methyl modified nucleoside, “s” is a phosphorothioate linkage, and N comprises one or more nucleosides. In some embodiments, the sense strand comprises modification pattern 17S: 5′-nnnnnNfNfnNfnNfnnnnnnnnsnsn-3′ (SEQ ID NO: 7616), wherein “Nf” is a 2′ fluoro-modified nucleoside, “n” is a 2′ O-methyl modified nucleoside, “s” is a phosphorothioate linkage, and N comprises one or more nucleosides. In some embodiments, the sense strand comprises modification pattern 18S: 5′-nnnnNfnNfnNfnNfnnnnnnnnsnsn-3′ (SEQ ID NO: 7617), wherein “Nf” is a 2′ fluoro-modified nucleoside, “n” is a 2′ O-methyl modified nucleoside, “s” is a phosphorothioate linkage, and N comprises one or more nucleosides. In some embodiments, the sense strand comprises modification pattern 19S: 5′-nnnnNfnNfnNfNfnnnnnnnnnsnsn-3′ (SEQ ID NO: 7618), wherein “Nf” is a 2′ fluoro-modified nucleoside, “n” is a 2′ O-methyl modified nucleoside, “s” is a phosphorothioate linkage, and N comprises one or more nucleosides. In some embodiments, the sense strand comprises modification pattern 20S: 5′-nnnnnnnnNfnNfnnnnnnnnsnsn-3′ (SEQ ID NO: 7619), wherein “Nf” is a 2′ fluoro-modified nucleoside, “n” is a 2′ O-methyl modified nucleoside, “s” is a phosphorothioate linkage, and N comprises one or more nucleosides. In some embodiments, the sense strand comprises modification pattern 21S: 5′-nnnnNfnnNfNfnNfnnnnnnnnsnsn-3′ (SEQ ID NO: 7620), wherein “Nf” is a 2′ fluoro-modified nucleoside, “n” is a 2′ O-methyl modified nucleoside, “s” is a phosphorothioate linkage, and N comprises one or more nucleosides. In some embodiments, the sense strand comprises modification pattern 22S: 5′-nnnnNfnnnNfnNfnnnnnnnnsnsn-3′ (SEQ ID NO: 7621), wherein “Nf” is a 2′ fluoro-modified nucleoside, “n” is a 2′ O-methyl modified nucleoside, “s” is a phosphorothioate linkage, and N comprises one or more nucleosides. In some embodiments, the sense strand comprises modification pattern 23S: 5′-nnnnnNfnNfNfnnnnnnnnnnsnsn-3′ (SEQ ID NO: 7622), wherein “Nf” is a 2′ fluoro-modified nucleoside, “n” is a 2′ O-methyl modified nucleoside, “s” is a phosphorothioate linkage, and N comprises one or more nucleosides. In some embodiments, the sense strand comprises modification pattern 24S: 5′-nnnnnnNfnNfnNfnnnnnnnnsnsn-3′ (SEQ ID NO: 7623), wherein “Nf” is a 2′ fluoro-modified nucleoside, “n” is a 2′ O-methyl modified nucleoside, “s” is a phosphorothioate linkage, and N comprises one or more nucleosides. In some embodiments, the sense strand comprises modification pattern 25S: 5′-nnnnnNfnNfNfnNfnnnnnnnnsnsn-3′ (SEQ ID NO: 7624), wherein “Nf” is a 2′ fluoro-modified nucleoside, “n” is a 2′ O-methyl modified nucleoside, “s” is a phosphorothioate linkage, and N comprises one or more nucleosides. In some embodiments, the sense strand comprises modification pattern 26S: 5′-nnnnnnnnNfnnnnnnnnnnsnsn-3′ (SEQ ID NO: 7625), wherein “Nf” is a 2′ fluoro-modified nucleoside, “n” is a 2′ O-methyl modified nucleoside, “s” is a phosphorothioate linkage, and N comprises one or more nucleosides. In some embodiments, the sense strand comprises modification pattern 27S: 5′-nnnnNfnNfnNfnnnnnnnnnnsnsn-3′ (SEQ ID NO: 7626), wherein “Nf” is a 2′ fluoro-modified nucleoside, “n” is a 2′ O-methyl modified nucleoside, “s” is a phosphorothioate linkage, and N comprises one or more nucleosides. In some embodiments, the sense strand comprises modification pattern 28S: 5′-nnnnnNfnnNfNfnnnnnnnnnsnsn-3′ (SEQ ID NO: 7627), wherein “Nf” is a 2′ fluoro-modified nucleoside, “n” is a 2′ O-methyl modified nucleoside, “s” is a phosphorothioate linkage, and N comprises one or more nucleosides. In some embodiments, the sense strand comprises modification pattern 29S: 5′-nnnnnNfnnNfnNfnnnnnnnnsnsn-3′ (SEQ ID NO: 7628), wherein “Nf” is a 2′ fluoro-modified nucleoside, “n” is a 2′ O-methyl modified nucleoside, “s” is a phosphorothioate linkage, and N comprises one or more nucleosides. In some embodiments, the sense strand comprises modification pattern 30S: 5′-nnnnNfNfnnNfnnnnnnnnnnsnsn-3′ (SEQ ID NO: 7629), wherein “Nf” is a 2′ fluoro-modified nucleoside, “n” is a 2′ O-methyl modified nucleoside, “s” is a phosphorothioate linkage, and N comprises one or more nucleosides. In some embodiments, the sense strand comprises modification pattern 31S: 5′-nnnnnNfNfnNfnnnnnnnnnnsnsn-3′ (SEQ ID NO: 7630), wherein “Nf” is a 2′ fluoro-modified nucleoside, “n” is a 2′ O-methyl modified nucleoside, “s” is a phosphorothioate linkage, and N comprises one or more nucleosides. In some embodiments, the sense strand comprises modification pattern 32S: 5′-nnnnnNfNfnNfNfnnnnnnnnnsnsn-3′ (SEQ ID NO: 7631), wherein “Nf” is a 2′ fluoro-modified nucleoside, “n” is a 2′ O-methyl modified nucleoside, “s” is a phosphorothioate linkage, and N comprises one or more nucleosides. In some embodiments, the sense strand comprises modification pattern 33S: 5′-nnnnnnnNfNfNfNfnnnnnnnnsnsn-3′ (SEQ ID NO: 7632), wherein “Nf” is a 2′ fluoro-modified nucleoside, “n” is a 2′ O-methyl modified nucleoside, “s” is a phosphorothioate linkage, and N comprises one or more nucleosides. In some embodiments, the sense strand comprises modification pattern 34S: 5′-nnnnnnNfNfNfNfNfnnnnnnnnsnsn-3′ (SEQ ID NO: 7633), wherein “Nf” is a 2′ fluoro-modified nucleoside, “n” is a 2′ O-methyl modified nucleoside, “s” is a phosphorothioate linkage, and N comprises one or more nucleosides. In some embodiments, the sense strand comprises modification pattern 35S: 5′-nnnnnNfnNfNfNfNfnnnnnnnnsnsn-3′ (SEQ ID NO: 7634), wherein “Nf” is a 2′ fluoro-modified nucleoside, “n” is a 2′ O-methyl modified nucleoside, “s” is a phosphorothioate linkage, and N comprises one or more nucleosides. In some embodiments, the sense strand comprises modification pattern 36S: 5′-nnnnnNfNfNfNfnNfnnnnnnnnsnsn-3′ (SEQ ID NO: 7635), wherein “Nf” is a 2′ fluoro-modified nucleoside, “n” is a 2′ O-methyl modified nucleoside, “s” is a phosphorothioate linkage, and N comprises one or more nucleosides. In some embodiments, the sense strand comprises modification pattern 37S: 5′-nnnnNfnnNfNfNfNfnnnnnnnnsnsn-3′ (SEQ ID NO: 7636), wherein “Nf” is a 2′ fluoro-modified nucleoside, “n” is a 2′ O-methyl modified nucleoside, “s” is a phosphorothioate linkage, and N comprises one or more nucleosides. In some embodiments, the sense strand comprises modification pattern 38S: 5′-nnnnNfnNfNfNfNfnnnnnnnnnsnsn-3′ (SEQ ID NO: 7637), wherein “Nf” is a 2′ fluoro-modified nucleoside, “n” is a 2′ O-methyl modified nucleoside, “s” is a phosphorothioate linkage, and N comprises one or more nucleosides. In some embodiments, the sense strand comprises modification pattern 39S: 5′-nnnnNfNfnNfNfnNfnnnnnnnnsnsn-3′ (SEQ ID NO: 7638), wherein “Nf” is a 2′ fluoro-modified nucleoside, “n” is a 2′ O-methyl modified nucleoside, “s” is a phosphorothioate linkage, and N comprises one or more nucleosides. In some embodiments, the sense strand comprises modification pattern 40S: 5′-nnnnNfNfNfNfNfnnnnnnnnnnsnsn-3′ (SEQ ID NO: 7639), wherein “Nf” is a 2′ fluoro-modified nucleoside, “n” is a 2′ O-methyl modified nucleoside, “s” is a phosphorothioate linkage, and N comprises one or more nucleosides. In some embodiments, the sense strand comprises modification pattern 41S: 5′-nnnnNfnNfNfdNnnnnnnnnnnsnsn-3′ (SEQ ID NO: 7640), wherein “Nf” is a 2′ fluoro-modified nucleoside, “dN” is a 2′ deoxy-modified nucleoside, “n” is a 2′ O-methyl modified nucleoside, “s” is a phosphorothioate linkage, and N comprises one or more nucleosides. In some embodiments, the sense strand comprises modification pattern 42S: 5′-NfsnsNfnNfnNfnNfnNfnNfnNfnNfnNfsnsn-3′ (SEQ ID NO: 7641), wherein “Nf” is a 2′ fluoro-modified nucleoside, “n” is a 2′ O-methyl modified nucleoside, “s” is a phosphorothioate linkage, and N comprises one or more nucleosides.

[0130] In some embodiments, the composition comprises an oligonucleotide that inhibits the expression of DKK2 wherein the oligonucleotide comprises an siRNA comprising a sense strand and an antisense strand, wherein the antisense strand comprises modification pattern 1AS: 5′-nsNfsnNfnNfnNfnNfnnnNfnNfnNfnsnsn-3′ (SEQ ID NO: 7642), wherein “Nf” is a 2′ fluoro-modified nucleoside, “n” is a 2′ O-methyl modified nucleoside, and “s” is a phosphorothioate linkage. In some embodiments, the antisense strand comprises modification pattern 2AS: 5′-nsNfsnnnNfnNfNfnnnnNfnNfnnnsnsn-3′ (SEQ ID NO: 7643), wherein “Nf” is a 2′ fluoro-modified nucleoside, “n” is a 2′ O-methyl modified nucleoside, and “s” is a phosphorothioate linkage. In some embodiments, the antisense strand comprises modification pattern 3AS: 5′-nsNfsnnnNfnnnnnnnNfnNfnnnsnsn-3′ (SEQ ID NO: 7644), wherein “Nf” is a 2′ fluoro-modified nucleoside, “n” is a 2′ O-methyl modified nucleoside, and “s” is a phosphorothioate linkage. In some embodiments, the antisense strand comprises modification pattern 4AS: 5′-nsNfsnNfnNfnnnnnnnNfnNfnnnsnsn-3′ (SEQ ID NO: 7645), wherein “Nf” is a 2′ fluoro-modified nucleoside, “n” is a 2′ O-methyl modified nucleoside, and “s” is a phosphorothioate linkage. In some embodiments, the antisense strand comprises modification pattern 5AS: 5′-nsNfsnNfnNfnNfnNfnNfnNfnNfnNfnsnsn-3′ (SEQ ID NO: 7646), wherein “Nf” is a 2′ fluoro-modified nucleoside, “n” is a 2′ O-methyl modified nucleoside, and “s” is a phosphorothioate linkage.

[0131] In some embodiments, the sense strand comprises pattern 1S, 2S, 3S, 4S, 5S, 6S, 7S, 8S, 9S, 10S, 1S, 12S, 13S, 14S, 15S, 16S, 17S, 18S, 19S, 20S, 21S, 22S, 23S, 24S, 25S, 26S, 27S, 28S, 29S,30S, 31S, 32S, 33S, 34S, 35S, 36S, 37S, 38S, 39S, 40S, 41S, or 42S, and the antisense strand comprises pattern 1AS. In some embodiments, the sense strand comprises pattern 1S, 2S, 3S, 4S, 5S, 6S, 7S, 8S, 9S, 10S, 11S, 12S, 13S, 14S, 15S, 16S, 17S, 18S, 19S, 20S, 21S, 22S, 23S, 24S, 25S, 26S, 27S, 28S, 29S,30S, 31S, 32S, 33S, 34S, 35S, 36S, 37S, 38S, 39S, 40S, 41S, or 42S, and the antisense strand comprises pattern 2AS. In some embodiments, the sense strand comprises pattern 1S, 2S, 3S, 4S, 5S, 6S, 7S, 8S, 9S, 10S, 11S, 12S, 13S, 14S, 15S, 16S, 17S, 18S, 19S, 20S, 21S, 22S, 23S, 24S, 25S, 26S, 27S, 28S, 29S,30S, 31S, 32S, 33S, 34S, 35S, 36S, 37S, 38S, 39S, 40S, 41S, or 42S, and the antisense strand comprises pattern 3AS. In some embodiments, the sense strand comprises pattern 1S, 2S, 3S, 4S, 5S, 6S, 7S, 8S, 9S, 10S, 11S, 12S, 13S, 14S, 15S, 16S, 17S, 18S, 19S, 20S, 21S, 22S, 23S, 24S, 25S, 26S, 27S, 28S, 29S,30S, 31S, 32S, 33S, 34S, 35S, 36S, 37S, 38S, 39S, 40S, 41S, or 42S, and the antisense strand comprises pattern 4AS. In some embodiments, the sense strand comprises pattern 1S, 2S, 3S, 4S, 5S, 6S, 7S, 8S, 9S, 10S, 11S, 12S, 13S, 14S, 15S, 16S, 17S, 18S, 19S, 20S, 21S, 22S, 23S, 24S, 25S, 26S, 27S, 28S, 29S,30S, 31S, 32S, 33S, 34S, 35S, 36S, 37S, 38S, 39S, 40S, 41S, or 42S, and the antisense strand comprises pattern 5AS.

[0132] In some embodiments, the sense strand comprises pattern 1S, 2S, 3S, 4S, 5S, 6S, 7S, 8S, 9S, 10S, 11S, 12S, 13S, 14S, 15S, 16S, 17S, 18S, 19S, 20S, 21S, 22S, 23S, 24S, 25S, 26S, 27S, 28S, 29S,30S, 31S, 32S, 33S, 34S, 35S, 36S, 37S, 38S, 39S, 40S, 41S, or 42S. In some embodiments, the sense strand comprises pattern 1S, 2S, 3S, 4S, or 5S. In some embodiments, the sense strand comprises modification pattern 1AS, 2AS, 3AS, 4AS, or 5AS. In some embodiments, the antisense strand comprises modification pattern 1AS, 2AS, 3AS, 4AS, or 5AS. In some embodiments, the antisense strand comprises modification pattern 1S, 2S, 3S, 4S, 5S, 6S, 7S, 8S, 9S, 10S, 1S, 12S, 13S, 14S, 15S, 16S, 17S, 18S, 19S, 20S, 21S, 22S, 23S, 24S, 25S, 26S, 27S, 28S, 29S,30S, 31S, 32S, 33S, 34S, 35S, 36S, 37S, 38S, 39S, 40S, 41S, or 42S. In some embodiments, the sense strand or the antisense strand comprises modification pattern ASO1.

[0133] In some embodiments, purines of the sense strand comprise 2′ fluoro modified purines. In some embodiments, purines of the sense strand comprise 2′-O-methyl modified purines. In some embodiments, purines of the sense strand comprise a mixture of 2′ fluoro and 2′-O-methyl modified purines. In some embodiments, all purines of the sense strand comprise 2′ fluoro modified purines. In some embodiments, all purines of the sense strand comprise 2′-O-methyl modified purines. In some embodiments, all purines of the sense strand comprise a mixture of 2′ fluoro and 2′-O-methyl modified purines.

[0134] In some embodiments, pyrimidines of the sense strand comprise 2′ fluoro modified pyrimidines. In some embodiments, pyrimidines of the sense strand comprise 2′-O-methyl modified pyrimidines. In some embodiments, pyrimidines of the sense strand comprise a mixture of 2′ fluoro and 2′-O-methyl modified pyrimidines. In some embodiments, all pyrimidines of the sense strand comprise 2′ fluoro modified pyrimidines. In some embodiments, all pyrimidines of the sense strand comprise 2′-O-methyl modified pyrimidines. In some embodiments, all pyrimidines of the sense strand comprise a mixture of 2′ fluoro and 2′-O-methyl modified pyrimidines.

[0135] In some embodiments, purines of the sense strand comprise 2′ fluoro modified purines, and pyrimidines of the sense strand comprise a mixture of 2′ fluoro and 2′-O-methyl modified pyrimidines. In some embodiments, purines of the sense strand comprise 2′-O-methyl modified purines, and pyrimidines of the sense strand comprise a mixture of 2′ fluoro and 2′-O-methyl modified pyrimidines. In some embodiments, purines of the sense strand comprise 2′ fluoro modified purines, and pyrimidines of the sense strand comprise 2′-O-methyl modified pyrimidines. In some embodiments, purines of the sense strand comprise 2′-O-methyl modified purines, and pyrimidines of the sense strand comprise 2′ fluoro modified pyrimidines. In some embodiments, pyrimidines of the sense strand comprise 2′ fluoro modified pyrimidines, and purines of the sense strand comprise a mixture of 2′ fluoro and 2′-O-methyl modified purines. In some embodiments, pyrimidines of the sense strand comprise 2′-O-methyl modified pyrimidines, and purines of the sense strand comprise a mixture of 2′ fluoro and 2′-O-methyl modified purines. In some embodiments, pyrimidines of the sense strand comprise 2′ fluoro modified pyrimidines, and purines of the sense strand comprise 2′-O-methyl modified purines. In some embodiments, pyrimidines of the sense strand comprise 2′-O-methyl modified pyrimidines, and purines of the sense strand comprise 2′ fluoro modified purines.

[0136] In some embodiments, all purines of the sense strand comprise 2′ fluoro modified purines, and all pyrimidines of the sense strand comprise a mixture of 2′ fluoro and 2′-O-methyl modified pyrimidines. In some embodiments, all purines of the sense strand comprise 2′-O-methyl modified purines, and all pyrimidines of the sense strand comprise a mixture of 2′ fluoro and 2′-O-methyl modified pyrimidines. In some embodiments, all purines of the sense strand comprise 2′ fluoro modified purines, and all pyrimidines of the sense strand comprise 2′-O-methyl modified pyrimidines. In some embodiments, all purines of the sense strand comprise 2′-O-methyl modified purines, and all pyrimidines of the sense strand comprise 2′ fluoro modified pyrimidines. In some embodiments, all pyrimidines of the sense strand comprise 2′ fluoro modified pyrimidines, and all purines of the sense strand comprise a mixture of 2′ fluoro and 2′-O-methyl modified purines. In some embodiments, all pyrimidines of the sense strand comprise 2′-O-methyl modified pyrimidines, and all purines of the sense strand comprise a mixture of 2′ fluoro and 2′-O-methyl modified purines. In some embodiments, all pyrimidines of the sense strand comprise 2′ fluoro modified pyrimidines, and all purines of the sense strand comprise 2′-O-methyl modified purines. In some embodiments, all pyrimidines of the sense strand comprise 2′-O-methyl modified pyrimidines, and all purines of the sense strand comprise 2′ fluoro modified purines.

[0137] In some embodiments, purines of the antisense strand comprise 2′ fluoro modified purines. In some embodiments, purines of the antisense strand comprise 2′-O-methyl modified purines. In some embodiments, purines of the antisense strand comprise a mixture of 2′ fluoro and 2′-O-methyl modified purines. In some embodiments, all purines of the antisense strand comprise 2′ fluoro modified purines. In some embodiments, all purines of the antisense strand comprise 2′-O-methyl modified purines. In some embodiments, all purines of the antisense strand comprise a mixture of 2′ fluoro and 2′-O-methyl modified purines.

[0138] In some embodiments, pyrimidines of the antisense strand comprise 2′ fluoro modified pyrimidines. In some embodiments, pyrimidines of the antisense strand comprise 2′-O-methyl modified pyrimidines. In some embodiments, pyrimidines of the antisense strand comprise a mixture of 2′ fluoro and 2′-O-methyl modified pyrimidines. In some embodiments, all pyrimidines of the antisense strand comprise 2′ fluoro modified pyrimidines. In some embodiments, all pyrimidines of the antisense strand comprise 2′-O-methyl modified pyrimidines. In some embodiments, all pyrimidines of the antisense strand comprise a mixture of 2′ fluoro and 2′-O-methyl modified pyrimidines.

[0139] In some embodiments, purines of the antisense strand comprise 2′ fluoro modified purines, and pyrimidines of the antisense strand comprise a mixture of 2′ fluoro and 2′-O-methyl modified pyrimidines. In some embodiments, purines of the antisense strand comprise 2′-O-methyl modified purines, and pyrimidines of the antisense strand comprise a mixture of 2′ fluoro and 2′-O-methyl modified pyrimidines. In some embodiments, purines of the antisense strand comprise 2′ fluoro modified purines, and pyrimidines of the antisense strand comprise 2′-O-methyl modified pyrimidines. In some embodiments, purines of the antisense strand comprise 2′-O-methyl modified purines, and pyrimidines of the antisense strand comprise 2′ fluoro modified pyrimidines. In some embodiments, pyrimidines of the antisense strand comprise 2′ fluoro modified pyrimidines, and purines of the antisense strand comprise a mixture of 2′ fluoro and 2′-O-methyl modified purines. In some embodiments, pyrimidines of the antisense strand comprise 2′-O-methyl modified pyrimidines, and purines of the antisense strand comprise a mixture of 2′ fluoro and 2′-O-methyl modified purines. In some embodiments, pyrimidines of the antisense strand comprise 2′ fluoro modified pyrimidines, and purines of the antisense strand comprise 2′-O-methyl modified purines. In some embodiments, pyrimidines of the antisense strand comprise 2′-O-methyl modified pyrimidines, and purines of the antisense strand comprise 2′ fluoro modified purines.

[0140] In some embodiments, all purines of the antisense strand comprise 2′ fluoro modified purines, and all pyrimidines of the antisense strand comprise a mixture of 2′ fluoro and 2′-O-methyl modified pyrimidines. In some embodiments, all purines of the antisense strand comprise 2′-O-methyl modified purines, and all pyrimidines of the antisense strand comprise a mixture of 2′ fluoro and 2′-O-methyl modified pyrimidines. In some embodiments, all purines of the antisense strand comprise 2′ fluoro modified purines, and all pyrimidines of the antisense strand comprise 2′-O-methyl modified pyrimidines. In some embodiments, all purines of the antisense strand comprise 2′-O-methyl modified purines, and all pyrimidines of the antisense strand comprise 2′ fluoro modified pyrimidines. In some embodiments, all pyrimidines of the antisense strand comprise 2′ fluoro modified pyrimidines, and all purines of the antisense strand comprise a mixture of 2′ fluoro and 2′-O-methyl modified purines. In some embodiments, all pyrimidines of the antisense strand comprise 2′-O-methyl modified pyrimidines, and all purines of the antisense strand comprise a mixture of 2′ fluoro and 2′-O-methyl modified purines. In some embodiments, all pyrimidines of the antisense strand comprise 2′ fluoro modified pyrimidines, and all purines of the antisense strand comprise 2′-O-methyl modified purines. In some embodiments, all pyrimidines of the antisense strand comprise 2′-O-methyl modified pyrimidines, and all purines of the antisense strand comprise 2′ fluoro modified purines.

[0141] Disclosed herein, in some embodiments, are modified oligonucleotides. The modified oligonucleotide may be an siRNA that includes modifications to the ribose rings, and phosphate linkages. The modifications may be in particular patterns that maximize cell delivery, stability, and efficiency. The siRNA may also include a vinyl phosphonate and a hydrophobic group. These modifications may aid in delivery to a cell or tissue within a subject. The modified oligonucleotide may be used in a method such as a treatment method or a method of reducing gene expression.

[0142] In some embodiments, the oligonucleotide comprises a duplex consisting of 21 nucleotide single strands with base pairing between 19 of the base pairs. In some embodiments, the duplex comprises single-stranded 2 nucleotide overhangs are at the 3′ ends of each strand. One strand (antisense strand) is complementary to a DKK2 mRNA. Each end of the antisense strand has one to two phosphorothioate bonds. The 5′ end has an optional phosphate mimic such as a vinyl phosphonate. In some embodiments, the oligonucleotide is used to knock down a DKK2 mRNA or a target protein. In some embodiments, the sense strand has the same sequence as the DKK2 mRNA. In some embodiments, there are 1-2 phosphorothioates at the 3′ end. In some embodiments, there are 1 or no phosphorothioates at the 5′ end. In some embodiments, there is a hydrophobic conjugate of 12 to 25 carbons attached at the 5′ end via a phosphodiester bond.

[0143] In some cases, the sense strand of any of the siRNAs comprises siRNA with a particular modification pattern. In some embodiments of the modification pattern, position 9 counting from the 5′ end of the sense strand may have a 2′F modification. In some embodiments, when position 9 of the sense strand is a pyrimidine, then all purines in the sense strand have a 2′OMe modification. In some embodiments, when position 9 is the only pyrimidine between positions 5 and 11 of the sense stand, then position 9 is the only position with a 2′F modification in the sense strand. In some embodiments, when position 9 and only one other base between positions 5 and 11 of the sense strand are pyrimidines, then both of these pyrimidines are the only two positions with a 2′F modification in the sense strand. In some embodiments, when position 9 and only two other bases between positions 5 and 11 of the sense strand are pyrimidines, and those two other pyrimidines are in adjacent positions so that there would be not three 2′F modifications in a row, then any combination of 2′F modifications can be made that give three 2′F modifications in total. In some embodiments, when there are more than 2 pyrimidines between positions 5 and 11 of the sense strand, then all combinations of pyrimidines having the 2′F modification are allowed that have three to five 2′F modifications in total, provided that the sense strand does not have three 2′F modifications in a row. In some cases, the sense strand of any of the siRNAs comprises a modification pattern which conforms to any or all of these sense strand rules.

[0144] In some embodiments, when position 9 of the sense strand is a purine, then all purines in the sense strand have a 2′OMe modification. In some embodiments, when position 9 is the only purine between positions 5 and 11 of the sense stand, then position 9 is the only position with a 2′F modification in the sense strand. In some embodiments, when position 9 and only one other base between positions 5 and 11 of the sense strand are purines, then both of these purines are the only two positions with a 2′F modification in the sense strand. In some embodiments, when position 9 and only two other bases between positions 5 and 11 of the sense strand are purines, and those two other purines are in adjacent positions so that there would be not three 2′F modifications in a row, then any combination of 2′F modifications can be made that give three 2′F modifications in total. In some embodiments, when there are more than 2 purines between positions 5 and 11 of the sense strand, then all combinations of purines having the 2′F modification are allowed that have three to five 2′F modifications in total, provided that the sense strand does not have three 2′F modifications in a row. In some cases, the sense strand of any of the siRNAs comprises a modification pattern which conforms to any or all of these sense strand rules.

[0145] In some cases, position 9 of the sense strand can be a 2′deoxy. In these cases, 2′F and 2′OMe modifications may occur at the other positions of the sense strand. In some cases, the sense strand of any of the siRNAs comprises a modification pattern which conforms to these sense strand rules.

[0146] In some embodiments, the siRNA comprises a sense strand or antisense strand having a sequence in accordance with the sense strand or antisense strand sequence in Table 4. In some embodiments, the sense strand or antisense strand comprises a sequence at least 75% identical, at least 80% identical, at least 85% identical, at least 90% identical, or at least 95% identical, to a sense strand or antisense strand sequence in Table 4. In some embodiments, the sense strand or antisense strand comprises a sequence of a sense or antisense strand in Table 4, or a sequence thereof having 3 or 4 nucleoside substitutions, additions, or deletions. In some embodiments, the sense strand or antisense strand comprises a sequence of a sense or antisense strand in Table 4, or a sequence thereof having 1 or 2 nucleoside substitutions, additions, or deletions. In some embodiments, the sense strand or antisense sequence comprises or consists of a sequence 100% identical to a sense strand or antisense strand sequence in Table 4. The sense strand or antisense strand sequence may include the first 5, 6, 7, 8, 9, 10, 11, 12, 13, 14, 15, 16, 17, 18, or 19 nucleotides (in the 5′ to 3′ direction) of any of the aforementioned sequences. The sense strand or antisense strand sequence may include the first 19 nucleotides of any of the aforementioned sequences. The sense strand or antisense strand sequence may include the last 5, 6, 7, 8, 9, 10, 11, 12, 13, 14, 15, 16, 17, 18, or 19 nucleotides (in the 5′ to 3′ direction) of any of the aforementioned sequences. The sense strand or antisense strand may comprise an overhang. The sense strand or antisense strand may comprise any modifications described herein (e.g. a different set of modifications or modification pattern than in Table 4). The sense strand or antisense strand may comprise a lipid moiety or a GalNAc moiety.

[0147] In some embodiments, the siRNA comprises a sense strand or antisense strand having a sequence in accordance with the sense strand or antisense strand sequence in Table 5. In some embodiments, the sense strand or antisense strand comprises a sequence at least 75% identical, at least 80% identical, at least 85% identical, at least 90% identical, or at least 95% identical, to a sense strand or antisense strand sequence in Table 5. In some embodiments, the sense strand or antisense strand comprises a sequence of a sense or antisense strand in Table 5, or a sequence thereof having 3 or 4 nucleoside substitutions, additions, or deletions. In some embodiments, the sense strand or antisense strand comprises a sequence of a sense or antisense strand in Table 5, or a sequence thereof having 1 or 2 nucleoside substitutions, additions, or deletions. In some embodiments, the sense strand or antisense sequence comprises or consists of a sequence 100% identical to a sense strand or antisense strand sequence in Table 5. The sense strand or antisense strand sequence may include the first 5, 6, 7, 8, 9, 10, 11, 12, 13, 14, 15, 16, 17, 18, or 19 nucleotides (in the 5′ to 3′ direction) of any of the aforementioned sequences. The sense strand or antisense strand sequence may include the first 19 nucleotides of any of the aforementioned sequences. The sense strand or antisense strand sequence may include the last 5, 6, 7, 8, 9, 10, 11, 12, 13, 14, 15, 16, 17, 18, or 19 nucleotides (in the 5′ to 3′ direction) of any of the aforementioned sequences. The sense strand or antisense strand may comprise an overhang. The sense strand or antisense strand may comprise any modifications described herein (e.g. a different set of modifications or modification pattern than in Table 5). The sense strand or antisense strand may comprise a lipid moiety or a GalNAc moiety.

[0148] In some embodiments, the siRNA comprises a sense strand or antisense strand having a sequence in accordance with the sense strand or antisense strand sequence in Table 6. In some embodiments, the sense strand or antisense strand comprises a sequence at least 75% identical, at least 80% identical, at least 85% identical, at least 90% identical, or at least 95% identical, to a sense strand or antisense strand sequence in Table 6. In some embodiments, the sense strand or antisense strand comprises a sequence of a sense or antisense strand in Table 6, or a sequence thereof having 3 or 4 nucleoside substitutions, additions, or deletions. In some embodiments, the sense strand or antisense strand comprises a sequence of a sense or antisense strand in Table 6, or a sequence thereof having 1 or 2 nucleoside substitutions, additions, or deletions. In some embodiments, the sense strand or antisense sequence comprises or consists of a sequence 100% identical to a sense strand or antisense strand sequence in Table 6. The sense strand or antisense strand sequence may include the first 5, 6, 7, 8, 9, 10, 11, 12, 13, 14, 15, 16, 17, 18, or 19 nucleotides (in the 5′ to 3′ direction) of any of the aforementioned sequences. The sense strand or antisense strand sequence may include the first 19 nucleotides of any of the aforementioned sequences. The sense strand or antisense strand sequence may include the last 5, 6, 7, 8, 9, 10, 11, 12, 13, 14, 15, 16, 17, 18, or 19 nucleotides (in the 5′ to 3′ direction) of any of the aforementioned sequences. The sense strand or antisense strand may comprise an overhang. The sense strand or antisense strand may comprise any modifications described herein (e.g. a different set of modifications or modification pattern than in Table 6). The sense strand or antisense strand may comprise a lipid moiety or a GalNAc moiety.

### 4. ASO Modification Patterns

[0149] In some embodiments, the composition comprises an oligonucleotide that inhibits the expression of DKK2, wherein the oligonucleotide comprises an antisense oligonucleotide (ASO). In some embodiments, the ASO comprises modification pattern ASO1: 5′-nsnsnsnsnsdNsdNsdNsdNsdNsdNsdNsdNsdNsdNsnsnsnsnsn-3′ (SEQ ID NO: 7647), wherein “dN” is any deoxynucleotide, “n” is a 2′O-methyl or 2′O-methoxyethyl-modified nucleoside, and “s” is a phosphorothioate linkage. In some embodiments, the ASO comprises modification pattern 1S, 2S, 3S, 4S, 5S, 6S, 7S, 8S, 9S, 10S, 1S, 12S, 13S, 14S, 15S, 16S, 17S, 18S, 19S, 20S, 21S, 22S, 23S, 24S, 25S, 26S, 27S, 28S, 29S,30S, 31S, 32S, 33S, 34S, 35S, 36S, 37S, 38S, 39S, 40S, 41S, 42S, 1AS, 2AS, 3AS, 4AS, or 5AS.

### D. Formulations

[0150] In some embodiments, the composition is a pharmaceutical composition. In some embodiments, the composition is sterile. In some embodiments, the composition further comprises a pharmaceutically acceptable carrier.

[0151] In some embodiments, the pharmaceutically acceptable carrier comprises water. In some embodiments, the pharmaceutically acceptable carrier comprises a buffer. In some embodiments, the pharmaceutically acceptable carrier comprises a saline solution. In some embodiments, the pharmaceutically acceptable carrier comprises a cream. In some embodiments, the pharmaceutically acceptable carrier comprises a gel. In some embodiments, the pharmaceutically acceptable carrier comprises water, a buffer, a saline solution, a cream, or a gel. In some embodiments, the pharmaceutically acceptable carrier comprises contains a permeation enhancer. In some embodiments, the formulation contains pharmaceutically acceptable counterions to the oligonucleotides. In some embodiments, the pharmaceutically acceptable counterions increase membrane affinity. In some embodiments, the composition comprises a liposome. In some embodiments, the pharmaceutically acceptable carrier comprises liposomes, lipids, nanoparticles, proteins, protein-antibody complexes, peptides, cellulose, nanogel, or a combination thereof. In some embodiments, the composition is formulated for topical administration.

### II. Methods and Uses

[0152] Disclosed herein, in some embodiments, are methods of administering a composition described herein to a subject. Some embodiments relate to use a composition described herein, such as administering the composition to a subject.

[0153] Some embodiments relate to a method of treating a disorder in a subject in need thereof. Some embodiments relate to use of a composition described herein in the method of treatment. Some embodiments include administering a composition described herein to a subject with the disorder. In some embodiments, the administration treats the disorder in the subject. In some embodiments, the composition treats the disorder in the subject.

[0154] In some embodiments, the treatment comprises prevention, inhibition, or reversion of the disorder in the subject. Some embodiments relate to use of a composition described herein in the method of preventing, inhibiting, or reversing the disorder. Some embodiments relate to a method of preventing, inhibiting, or reversing a disorder a disorder in a subject in need thereof. Some embodiments include administering a composition described herein to a subject with the disorder. In some embodiments, the administration prevents, inhibits, or reverses the disorder in the subject. In some embodiments, the composition prevents, inhibits, or reverses the disorder in the subject.

[0155] Some embodiments relate to a method of preventing a disorder a disorder in a subject in need thereof. Some embodiments relate to use of a composition described herein in the method of preventing the disorder. Some embodiments include administering a composition described herein to a subject with the disorder. In some embodiments, the administration prevents the disorder in the subject. In some embodiments, the composition prevents the disorder in the subject.

[0156] Some embodiments relate to a method of inhibiting a disorder a disorder in a subject in need thereof. Some embodiments relate to use of a composition described herein in the method of inhibiting the disorder. Some embodiments include administering a composition described herein to a subject with the disorder. In some embodiments, the administration inhibits the disorder in the subject. In some embodiments, the composition inhibits the disorder in the subject.

[0157] Some embodiments relate to a method of reversing a disorder a disorder in a subject in need thereof. Some embodiments relate to use of a composition described herein in the method of reversing the disorder. Some embodiments include administering a composition described herein to a subject with the disorder. In some embodiments, the administration reverses the disorder in the subject. In some embodiments, the composition reverses the disorder in the subject.

[0158] The administration may be topical. For example, a composition or formulation described herein may be administered to a scalp. The topical administration may include rubbing, brushing, swabbing, dabbing, or wiping. The administration may be on a skin area of the subject. The skin area may include hair. The skin area may include hair loss. The skin area may be at risk of hair loss. The skin area may include an area of the head. The skin area may include a scalp. The skin area may include a scalp region. The skin area may include a temporal region. The skin area may include a neck region.

### A. Disorders

[0159] Some embodiments of the methods described herein include treating a disorder in a subject in need thereof. In some embodiments, the disorder includes hair loss. In some embodiments, the disorder is hair loss. Non-limiting examples of hair loss include androgenetic alopecia (male pattern baldness), alopecia areata, and non-scarring hair loss. In some embodiments, the disorder includes hair discoloration or graying. In some embodiments, the hair loss comprises male pattern baldness. In some embodiments, the hair loss comprises alopecia areata. In some embodiments, the hair loss comprises scarring hair loss. In some embodiments, the hair loss comprises non-scarring hair loss.

### B. Subjects

[0160] Some embodiments of the methods described herein include treatment of a subject. Non-limiting examples of subjects include vertebrates, animals, mammals, dogs, cats, cattle, rodents, mice, rats, primates, monkeys, and humans. In some embodiments, the subject is a vertebrate. In some embodiments, the subject is an animal. In some embodiments, the subject is a mammal. In some embodiments, the subject is a dog. In some embodiments, the subject is a cat. In some embodiments, the subject is a cattle. In some embodiments, the subject is a mouse. In some embodiments, the subject is a rat. In some embodiments, the subject is a primate. In some embodiments, the subject is a monkey. In some embodiments, the subject is an animal, a mammal, a dog, a cat, cattle, a rodent, a mouse, a rat, a primate, or a monkey. In some embodiments, the subject is a human. In some embodiments, the subject is male. In some embodiments, the subject is female.

[0161] In some embodiments, the subject has a body mass index (BMI) of 25, 26, 27, 28, 29, 30, 31, 32, 33, 34, 35, 36, 37, 38, 39, 40, 41, 42, 43, 44, 45, 46, 47, 48, 49, 50, or more, or a range defined by any two of the aforementioned integers. In some embodiments, the subject is overweight. In some embodiments, the subject has a BMI of 25 or more. In some embodiments, the subject has a BMI of 25-29. In some embodiments, the subject is obese. In some embodiments, the subject has a BMI of 30 or more. In some embodiments, the subject has a BMI of 30-39. In some embodiments, the subject has a BMI of 40-50. In some embodiments, the subject has a BMI of 25-50.

[0162] In some embodiments, the subject is ≥90 years of age. In some embodiments, the subject is ≥85 years of age. In some embodiments, the subject is ≥80 years of age. In some embodiments, the subject is ≥70 years of age. In some embodiments, the subject is ≥60 years of age. In some embodiments, the subject is ≥50 years of age. In some embodiments, the subject is ≥40 years of age. In some embodiments, the subject is ≥30 years of age. In some embodiments, the subject is ≥20 years of age. In some embodiments, the subject is ≥10 years of age. In some embodiments, the subject is ≥1 years of age. In some embodiments, the subject is ≥0 years of age.

[0163] In some embodiments, the subject is ≤100 years of age. In some embodiments, the subject is ≤90 years of age. In some embodiments, the subject is ≤85 years of age. In some embodiments, the subject is ≤80 years of age. In some embodiments, the subject is ≤70 years of age. In some embodiments, the subject is ≤60 years of age. In some embodiments, the subject is ≤50 years of age. In some embodiments, the subject is ≤40 years of age. In some embodiments, the subject is ≤30 years of age. In some embodiments, the subject is ≤20 years of age. In some embodiments, the subject is ≤10 years of age. In some embodiments, the subject is ≤1 years of age.

[0164] In some embodiments, the subject is between 0 and 100 years of age. In some embodiments, the subject is between 20 and 90 years of age. In some embodiments, the subject is between 30 and 80 years of age. In some embodiments, the subject is between 40 and 75 years of age. In some embodiments, the subject is between 50 and 70 years of age. In some embodiments, the subject is between 40 and 85 years of age. In some embodiments, the subject is aging. In some embodiments, the subject is an adult.

[0165] In some embodiments, the subject has a family history of hair loss. In some embodiments, the subject has hormone levels related to hair loss. In some embodiments, the subject has a thyroid disorder. In some embodiments, the subject is malnourished. In some embodiments, the subject has been subjected to environmental factors affecting hair loss. In some embodiments, the subject has subjected to physical stress. In some embodiments, the subject has subjected to emotional stress.

### C. Baseline Measurements

[0166] Some embodiments of the methods described herein include obtaining a baseline measurement from a subject. For example, in some embodiments, a baseline measurement is obtained from the subject prior to treating the subject. In some embodiments, the baseline measurement is a baseline hair loss measurement. In some embodiments, the baseline measurement is a baseline measurement of a symptom of hair loss. Non-limiting examples of baseline measurements include a baseline hair loss assessment score, a baseline total hair count, a baseline vellus hair count, a baseline non-vellus hair count, a baseline hair thickness measurement, a baseline hair density measurement, or a baseline number of hair follicles. The baseline measurement may include a baseline hair color measurement. The baseline measurement may include a baseline gene or protein level, a baseline DKK2 mRNA level, or a baseline DKK2 protein level.

[0167] In some embodiments, the baseline measurement is obtained non-invasively. In some embodiments, the baseline measurement is obtained directly from the subject. In some embodiments, the baseline measurement is obtained by observation, for example by observation of the subject or of the subject's tissue. In some embodiments, the baseline measurement is obtained noninvasively using an imaging device. In some embodiments, the baseline measurement is obtained using a photograph. In some embodiments, the baseline measurement is obtained using a phototrichogram. In some embodiments, the baseline measurement is obtained using a macrophotography analysis. In some embodiments, the baseline measurement is obtained using a questionnaire.

[0168] In some embodiments, the baseline measurement is obtained invasively. In some embodiments, the baseline measurement is obtained in a sample from the subject. In some embodiments, the baseline measurement is obtained in a biopsy such as a scalp biopsy. In some embodiments, the baseline measurement is obtained in one or more histological tissue sections. In some embodiments, the baseline measurement is obtained by performing an assay such as an immunoassay, a colorimetric assay, or a fluorescence assay, on the sample obtained from the subject. In some embodiments, the baseline measurement is obtained by an immunoassay, a colorimetric assay, or a fluorescence assay. In some embodiments, the baseline measurement is obtained by PCR.

[0169] In some embodiments, the baseline measurement is a baseline questionnaire result. In some embodiments, the baseline measurement is a baseline hair loss hair loss assessment score. In some embodiments, the baseline questionnaire result comprises a baseline score such as a baseline hair loss assessment score. In some embodiments, the baseline questionnaire result is obtained from a questionnaire. In some embodiments, the baseline questionnaire result is obtained from multiple questionnaires. In some embodiments, the questionnaire is a Men's Hair Growth Questionnaire (MHGQ). In some embodiments, the questionnaire is a Kingsley Alopecia Profile (KAP) questionnaire. The questionnaire may include questions about hair growth that the subject rates. Non-limiting examples of such ratings may include strongly agree, agree, neither agree nor disagree, disagree, and strongly disagree, where each rating is assigned a value. The baseline score may include a sum of each value. In some embodiments, the baseline hair loss assessment score is not based on a questionnaire. In some embodiments, the baseline hair loss assessment score is assessed by a medical practitioner. In some embodiments, the baseline hair loss assessment score includes a semi-quantitative hair visual hair score on a numerical scale such as 1-10.

[0170] In some embodiments, the baseline measurement is a baseline hair count. In some embodiments, the baseline hair count is a baseline total hair count. The baseline total hair count may include a baseline vellus hair count and a baseline non-vellus hair count. In some embodiments, the baseline hair count is a baseline vellus hair count. In some embodiments, the baseline hair count is a baseline non-vellus hair count. In some embodiments, the baseline hair count is determined in an area of skin. In some embodiments, the baseline hair count is normalized based on the area of skin. In some embodiments, the baseline hair count is assessed using photography. In some embodiments, the baseline hair count is assessed by phototrichogram. In some embodiments, the baseline hair count is assessed by a macrophotography analysis.

[0171] In some embodiments, the baseline measurement is a baseline hair thickness measurement. In some embodiments, the baseline hair thickness measurement is determined in an area of skin. In some embodiments, the baseline hair thickness measurement comprises a width of an individual hair. In some embodiments, the baseline hair thickness measurement comprises widths of multiple individual hairs. In some embodiments, the baseline hair thickness measurement comprises an average of the widths of the multiple individual hairs. In some embodiments, the baseline hair thickness measurement comprises a median of the widths of the multiple individual hairs. The baseline hair thickness measurement may include a baseline vellus hair thickness measurement. The baseline hair thickness measurement may include a baseline non-vellus hair thickness measurement. In some embodiments, the baseline hair thickness measurement is assessed using photography. In some embodiments, the baseline hair thickness measurement is assessed by phototrichogram. In some embodiments, the baseline hair thickness measurement is assessed by a macrophotography analysis.

[0172] In some embodiments, the baseline measurement is a baseline hair density measurement. In some embodiments, the baseline hair density measurement is determined in an area of skin. In some embodiments, the baseline hair density measurement comprises a number of hair in the area of skin. In some embodiments, the baseline hair density measurement comprises the number of hair in the area of skin divided by the area of skin. The baseline hair density measurement may include a baseline vellus hair density measurement. The baseline hair density measurement may include a baseline non-vellus hair density measurement. In some embodiments, the baseline hair density measurement is assessed using photography. In some embodiments, the baseline hair density measurement is assessed by phototrichogram. In some embodiments, the baseline hair density measurement is assessed by a macrophotography analysis.

[0173] In some embodiments, the baseline measurement is a baseline number of hair follicles. In some embodiments, the baseline number of hair follicles is a baseline total number of hair follicles. In some embodiments, the baseline number of hair follicles include a baseline number of terminal hair follicles. In some embodiments, the baseline number of hair follicles include a baseline number of anagen hair follicles. In some embodiments, the baseline number of hair follicles include a baseline number of telogen hair follicles. In some embodiments, the baseline number of hair follicles include a baseline number of catagen hair follicles. In some embodiments, the baseline number of hair follicles include a baseline number of miniaturized hair follicles. In some embodiments, the baseline number of hair follicles include a baseline number of vellus miniaturized hair follicles. In some embodiments, the baseline number of hair follicles include a baseline number of vellus-like miniaturized hair follicles. In some embodiments, the baseline number of hair follicles include a baseline number of indeterminate hair follicles. In some embodiments, the baseline number of hair follicles is determined in an area of skin. In some embodiments, the baseline number of hair follicles is normalized based on the area of skin. In some embodiments, the baseline number of hair follicles is assessed in a biopsy, such as a scalp biopsy. In some embodiments, the baseline number of hair follicles is assessed using photography.

[0174] In some embodiments, the baseline measurement is a baseline hair color measurement. In some embodiments, the baseline hair color measurement is determined in an area of skin. In some embodiments, the baseline hair color measurement comprises a color of an individual hair. In some embodiments, the baseline hair color measurement comprises colors of multiple individual hairs. In some embodiments, the baseline hair color measurement comprises an average of the colors of the multiple individual hairs. In some embodiments, the baseline hair color measurement comprises a median of the colors of the multiple individual hairs. The baseline hair color measurement may include a baseline measurement of how gray the har is, or how gray the hairs are. The baseline hair color measurement may include a baseline measurement of how much color is in the hair, or how much color is in the hairs. The baseline hair color measurement may include a baseline measurement of how white the har is, or how white the hairs are. The baseline hair color measurement may include a hair pigmentation measurement. The baseline hair color measurement may include a hair contrast measurement. The baseline hair color measurement may include a baseline vellus hair color measurement. The baseline hair color measurement may include a baseline non-vellus hair color measurement. In some embodiments, the baseline hair color measurement is assessed using photography. In some embodiments, the baseline hair color measurement is assessed by phototrichogram. In some embodiments, the baseline hair color measurement is assessed by a macrophotography analysis. The baseline hair color measurement may be a qualitative measurement. The baseline hair color measurement may be a quantitative measurement. The baseline hair color measurement may be a number, such as an amount of hair color. The baseline hair color measurement may be a rate, such as a rate of hair color loss.

[0175] In some embodiments, the baseline measurement is a baseline protein level. In some embodiments, the baseline protein level is a baseline β-catenin protein level. In some embodiments, the baseline protein level is a baseline α-SMA protein level. In some embodiments, the baseline protein level is a baseline collagen protein level. In some embodiments, the collagen of the baseline collagen protein level is collagen I. In some embodiments, the collagen of the baseline collagen protein level is collagen III. In some embodiments, the baseline protein level is assessed in a baseline sample such as a baseline skin sample. In some embodiments, the baseline protein level is indicated as a mass or percentage of protein per sample weight. In some embodiments, the baseline protein level is indicated as a mass or percentage of protein per sample volume. In some embodiments, the baseline protein level is indicated as a mass or percentage of protein per total protein within the sample. In some embodiments, the baseline protein measurement is a baseline circulating protein measurement. In some embodiments, the baseline protein measurement is obtained by an assay such as an immunoassay, a colorimetric assay, or a fluorescence assay.

[0176] In some embodiments, the baseline measurement is a baseline mRNA level. In some embodiments, the baseline mRNA level is a baseline β-catenin mRNA level. In some embodiments, the baseline mRNA level is a baseline α-SMA mRNA level. In some embodiments, the baseline mRNA level is a baseline collagen mRNA level. In some embodiments, the collagen of the baseline collagen mRNA level is collagen I. In some embodiments, the collagen of the baseline collagen mRNA level is collagen III. In some embodiments, the baseline mRNA level is assessed in a baseline sample such as a baseline skin sample. In some embodiments, the baseline mRNA level is indicated as a mass or percentage of mRNA per sample weight. In some embodiments, the baseline mRNA level is indicated as a mass or percentage of mRNA per sample volume. In some embodiments, the baseline mRNA level is indicated as a mass or percentage of mRNA per total mRNA within the sample. In some embodiments, the baseline mRNA level is indicated as a mass or percentage of mRNA per total nucleic acids within the sample. In some embodiments, the baseline mRNA level is indicated relative to another mRNA level, such as an mRNA level of a housekeeping gene, within the sample. In some embodiments, the baseline mRNA measurement is obtained by an assay such as a polymerase chain reaction (PCR) assay. In some embodiments, the PCR comprises quantitative PCR (qPCR). In some embodiments, the PCR comprises reverse transcription of the mRNA.

[0177] In some embodiments, the baseline measurement is a baseline DKK2 protein measurement. In some embodiments, the baseline DKK2 protein measurement comprises a baseline DKK2 protein level. In some embodiments, the baseline DKK2 protein level is assessed in a baseline sample such as a baseline skin sample or a baseline fluid sample (e.g. blood, serum, or plasma). In some embodiments, the baseline DKK2 protein level is indicated as a mass or percentage of DKK2 protein per sample weight. In some embodiments, the baseline DKK2 protein level is indicated as a mass or percentage of DKK2 protein per sample volume. In some embodiments, the baseline DKK2 protein level is indicated as a mass or percentage of DKK2 protein per total protein within the sample. In some embodiments, the baseline DKK2 protein measurement is a baseline circulating DKK2 protein measurement. In some embodiments, the baseline DKK2 protein measurement is obtained by an assay such as an immunoassay, a colorimetric assay, or a fluorescence assay.

[0178] In some embodiments, the baseline measurement is a baseline DKK2 mRNA measurement. In some embodiments, the baseline DKK2 mRNA measurement comprises a baseline DKK2 mRNA level. In some embodiments, the baseline DKK2 mRNA level is assessed in a baseline sample such as a baseline skin sample. In some embodiments, the baseline DKK2 mRNA level is indicated as a mass or percentage of DKK2 mRNA per sample weight. In some embodiments, the baseline DKK2 mRNA level is indicated as a mass or percentage of DKK2 mRNA per sample volume. In some embodiments, the baseline DKK2 mRNA level is indicated as a mass or percentage of DKK2 mRNA per total mRNA within the sample. In some embodiments, the baseline DKK2 mRNA level is indicated as a mass or percentage of DKK2 mRNA per total nucleic acids within the sample. In some embodiments, the baseline DKK2 mRNA level is indicated relative to another mRNA level, such as an mRNA level of a housekeeping gene, within the sample. In some embodiments, the baseline DKK2 mRNA measurement is obtained by an assay such as a polymerase chain reaction (PCR) assay. In some embodiments, the PCR comprises quantitative PCR (qPCR). In some embodiments, the PCR comprises reverse transcription of the DKK2 mRNA.

[0179] Some embodiments of the methods described herein include obtaining a sample from a subject. In some embodiments, the baseline measurement is obtained in a sample obtained from the subject. In some embodiments, the sample is obtained from the subject prior to administration or treatment of the subject with a composition described herein. In some embodiments, a baseline measurement is obtained in a sample obtained from the subject prior to administering the composition to the subject. In some embodiments, the sample is obtained from the subject in a fasted state. In some embodiments, the sample is obtained from the subject after an overnight fasting period. In some embodiments, the sample is obtained from the subject in a fed state.

[0180] In some embodiments, the sample comprises a fluid. In some embodiments, the sample is a fluid sample. In some embodiments, the sample is a blood, plasma, or serum sample. In some embodiments, the sample comprises blood. In some embodiments, the sample is a blood sample. In some embodiments, the sample is a whole-blood sample. In some embodiments, the blood is fractionated or centrifuged. In some embodiments, the sample comprises plasma. In some embodiments, the sample is a plasma sample. In some embodiments, the sample comprises serum. In some embodiments, the sample is a serum sample.

[0181] In some embodiments, the sample comprises a tissue. The tissue may be or include skin. The skin may comprise or consist of a skin layer. The skin layer may be or include a dermal layer or an epidermal layer. The skin may include epidermis. The skin may include epidermis. The skin may include scalp skin. The skin may eyebrow skin. The skin may pubic skin. The skin may include skin from a leg of the subject. The skin may include skin from an arm of the subject. The skin may include one or more hairs. The hairs may be any of scalp hairs, eyebrow hairs, pubic hairs, arm hairs, or leg hairs.

[0182] In some embodiments, the sample is a tissue sample. In some embodiments, the sample comprises skin. In some embodiments, the sample is a skin sample. For example, the baseline DKK2 mRNA measurement, or the baseline DKK2 protein measurement, may be obtained in a skin sample from the patient prior to administration of a compound or oligonucleotide disclosed herein. In some embodiments, the sample is a biopsy. In some embodiments, the biopsy is a skin biopsy. In some embodiments, the skin biopsy includes a scalp biopsy.

### D. Effects

[0183] In some embodiments, the composition or administration of the composition affects a measurement such as a hair loss measurement or a measurement of a symptom of hair loss. In some embodiments, the measurement is a hair loss assessment score, a total hair count, a vellus hair count, a non-vellus hair count, a hair thickness measurement, a hair density measurement, a number of hair follicles, a hair color measurement, a gene or protein level, a DKK2 protein measurement (for example, circulating or tissue DKK2 protein levels), or a DKK2 mRNA measurement, relative to the baseline measurement.

[0184] Some embodiments of the methods described herein include obtaining the measurement from a subject. For example, the measurement may be obtained from the subject after treating the subject. In some embodiments, the measurement is obtained in a second sample (such as a fluid or tissue sample described herein) obtained from the subject after the composition is administered to the subject. In some embodiments, the measurement indicates that the disorder has been treated.

[0185] In some embodiments, the measurement is obtained non-invasively. In some embodiments, the measurement is obtained directly from the subject. In some embodiments, the measurement is obtained by observation, for example by observation of the subject or of the subject's tissue. In some embodiments, the measurement is obtained noninvasively using an imaging device. In some embodiments, the measurement is obtained using a photograph. In some embodiments, the measurement is obtained using a phototrichogram. In some embodiments, the measurement is obtained using a macrophotography analysis. In some embodiments, the measurement is obtained using a questionnaire.

[0186] In some embodiments, the measurement is obtained invasively. In some embodiments, the measurement is obtained in a second sample from the subject. In some embodiments, the measurement is obtained in a biopsy such as a scalp biopsy. In some embodiments, the measurement is obtained in one or more histological tissue sections. In some embodiments, the measurement is obtained by performing an assay on the second sample obtained from the subject. In some embodiments, the measurement is obtained by an assay, such as an assay described herein. In some embodiments, the assay is an immunoassay, a colorimetric assay, a fluorescence assay, or a PCR assay. In some embodiments, the measurement is obtained by an assay such as an immunoassay, a colorimetric assay, or a fluorescence assay. In some embodiments, the measurement is obtained by PCR. In some embodiments, the measurement is obtained by histology. In some embodiments, the measurement is obtained by observation. In some embodiments, additional measurements are made, such as in a 3rd sample, a 4th sample, or a fifth sample.

[0187] In some embodiments, the measurement is obtained within 1 hour, within 2 hours, within 3 hours, within 4 hours, within 5 hours, within 6 hours, within 12 hours, within 18 hours, or within 24 hours after the administration of the composition. In some embodiments, the measurement is obtained within 1 day, within 2 days, within 3 days, within 4 days, within 5 days, within 6 days, or within 7 days after the administration of the composition. In some embodiments, the measurement is obtained within 1 week, within 2 weeks, within 3 weeks, within 1 month, within 2 months, within 3 months, within 6 months, within 1 year, within 2 years, within 3 years, within 4 years, or within 5 years after the administration of the composition. In some embodiments, the measurement is obtained after 1 hour, after 2 hours, after 3 hours, after 4 hours, after 5 hours, after 6 hours, after 12 hours, after 18 hours, or after 24 hours after the administration of the composition. In some embodiments, the measurement is obtained after 1 day, after 2 days, after 3 days, after 4 days, after 5 days, after 6 days, or after 7 days after the administration of the composition. In some embodiments, the measurement is obtained after 1 week, after 2 weeks, after 3 weeks, after 1 month, after 2 months, after 3 months, after 6 months, after 1 year, after 2 years, after 3 years, after 4 years, or after 5 years, following the administration of the composition.

[0188] In some embodiments, the composition reduces the measurement relative to the baseline measurement. In some embodiments, the reduction is measured in a second tissue sample obtained from the subject after administering the composition to the subject. In some embodiments, the reduction is measured directly in the subject after administering the composition to the subject. In some embodiments, the measurement is decreased by about 2.5% or more, about 5% or more, or about 7.5% or more, relative to the baseline measurement. In some embodiments, the measurement is decreased by about 10% or more, relative to the baseline measurement. In some embodiments, the measurement is decreased by about 20% or more, about 30% or more, about 40% or more, about 50% or more, about 60% or more, about 70% or more, about 80% or more, about 90% or more, relative to the baseline measurement. In some embodiments, the measurement is decreased by no more than about 2.5%, no more than about 5%, or no more than about 7.5%, relative to the baseline measurement. In some embodiments, the measurement is decreased by no more than about 10%, relative to the baseline measurement. In some embodiments, the measurement is decreased by no more than about 20%, no more than about 30%, no more than about 40%, no more than about 50%, no more than about 60%, no more than about 70%, no more than about 80%, no more than about 90%, or no more than about 100% relative to the baseline measurement. In some embodiments, the measurement is decreased by 2.5%, 5%, 7.5%, 10%, 20%, 30%, 40%, 50%, 60%, 70%, 80%, 90%, or 100%, or by a range defined by any of the two aforementioned percentages.

[0189] In some embodiments, the composition increases the measurement relative to the baseline measurement. In some embodiments, the increase is measured in a second tissue sample obtained from the subject after administering the composition to the subject. In some embodiments, the increase is measured directly in the subject after administering the composition to the subject. In some embodiments, the measurement is increased by about 2.5% or more, about 5% or more, or about 7.5% or more, relative to the baseline measurement. In some embodiments, the measurement is increased by about 10% or more, relative to the baseline measurement. In some embodiments, the measurement is increased by about 20% or more, about 30% or more, about 40% or more, about 50% or more, about 60% or more, about 70% or more, about 80% or more, about 90% or more, relative to the baseline measurement. In some embodiments, the measurement is increased by about 100% or more, increased by about 250% or more, increased by about 500% or more, increased by about 750% or more, or increased by about 1000% or more, relative to the baseline measurement. In some embodiments, the measurement is increased by no more than about 2.5%, no more than about 5%, or no more than about 7.5%, relative to the baseline measurement. In some embodiments, the measurement is increased by no more than about 10%, relative to the baseline measurement. In some embodiments, the measurement is increased by no more than about 20%, no more than about 30%, no more than about 40%, no more than about 50%, no more than about 60%, no more than about 70%, no more than about 80%, no more than about 90%, or no more than about 100% relative to the baseline measurement. In some embodiments, the measurement is increased by no more than about 100%, increased by no more than about 250%, increased by no more than about 500%, increased by no more than about 750%, or increased by no more than about 1000%, relative to the baseline measurement. In some embodiments, the measurement is increased by 2.5%, 5%, 7.5%, 10%, 20%, 30%, 40%, 50%, 60%, 70%, 80%, 90%, 100%, 250%, 500%, 750%, or 1000%, or by a range defined by any of the two aforementioned percentages.

[0190] In some embodiments, the measurement is a questionnaire result. In some embodiments, the measurement is a hair loss assessment score. In some embodiments, the questionnaire result comprises a score such as a hair loss assessment score. In some embodiments, the questionnaire result is obtained from a questionnaire. In some embodiments, the questionnaire result is obtained from multiple questionnaires. In some embodiments, the questionnaire is a Men's Hair Growth Questionnaire (MHGQ). In some embodiments, the questionnaire is a Kingsley Alopecia Profile (KAP) questionnaire. The questionnaire may include questions about hair growth that the subject rates. Non-limiting examples of such ratings may include strongly agree, agree, neither agree nor disagree, disagree, and strongly disagree, where each rating is assigned a value. The score may include a sum of each value. In some embodiments, the hair loss assessment score is not based on a questionnaire. In some embodiments, the hair loss assessment score is determined by a medical practitioner. In some embodiments, the hair loss assessment score includes a semi-quantitative hair visual hair score on a numerical scale such as 1-10.

[0191] In some embodiments, the composition changes the hair loss assessment score relative to the baseline hair loss assessment score. In some embodiments, the change in the hair loss assessment score is an increase. In some embodiments, the change in the hair loss assessment score is a decrease. In some embodiments, the change is measured in the subject after administering the composition to the subject. In some embodiments, the change is measured directly by the subject after the composition is administered to the subject. In some embodiments, the hair loss assessment score is changed by about 2.5% or more, about 5% or more, or about 7.5% or more, relative to the baseline hair loss assessment score. In some embodiments, the hair loss assessment score is changed by about 10% or more, relative to the baseline hair loss assessment score. In some embodiments, the hair loss assessment score is changed by about 20% or more, about 30% or more, about 40% or more, about 50% or more, about 60% or more, about 70% or more, about 80% or more, about 90% or more, relative to the baseline hair loss assessment score. In some embodiments, the hair loss assessment score is changed by about 100% or more, changed by about 250% or more, changed by about 500% or more, changed by about 750% or more, or changed by about 1000% or more, relative to the baseline hair loss assessment score. In some embodiments, the hair loss assessment score is changed by no more than about 2.5%, no more than about 5%, or no more than about 7.5%, relative to the baseline hair loss assessment score. In some embodiments, the hair loss assessment score is changed by no more than about 10%, relative to the baseline hair loss assessment score. In some embodiments, the hair loss assessment score is changed by no more than about 20%, no more than about 30%, no more than about 40%, no more than about 50%, no more than about 60%, no more than about 70%, no more than about 80%, no more than about 90%, or no more than about 100% relative to the baseline hair loss assessment score. In some embodiments, the hair loss assessment score is changed by no more than about 100%, changed by no more than about 250%, changed by no more than about 500%, changed by no more than about 750%, or changed by no more than about 1000%, relative to the baseline hair loss assessment score. In some embodiments, the hair loss assessment score is changed by 2.5%, 5%, 7.5%, 10%, 20%, 30%, 40%, 50%, 60%, 70%, 80%, 90%, or 100%, or by a range defined by any of the two aforementioned percentages. In some embodiments, the hair loss assessment score is changed by 2.5%, 5%, 7.5%, 10%, 20%, 30%, 40%, 50%, 60%, 70%, 80%, 90%, 100%, 250%, 500%, 750%, or 1000%, or by a range defined by any of the two aforementioned percentages.

[0192] In some embodiments, the measurement is a hair count. In some embodiments, the hair count is a total hair count. The total hair count may include a vellus hair count and a non-vellus hair count. In some embodiments, the hair count is a vellus hair count. In some embodiments, the hair count is a non-vellus hair count. In some embodiments, the hair count is determined in an area of skin. In some embodiments, the hair count is normalized based on the area of skin. In some embodiments, the hair count is assessed using photography. In some embodiments, the hair count is assessed by phototrichogram. In some embodiments, the hair count is assessed by a macrophotography analysis.

[0193] In some embodiments, the composition increases the hair count relative to the baseline hair count. In some embodiments, the increase is measured in the subject after administering the composition to the subject. In some embodiments, the increase is measured directly on the subject after administering the composition to the subject. In some embodiments, the hair count is increased by about 2.5% or more, about 5% or more, or about 7.5% or more, relative to the baseline hair count. In some embodiments, the hair count is increased by about 10% or more, relative to the baseline hair count. In some embodiments, the hair count is increased by about 20% or more, about 30% or more, about 40% or more, about 50% or more, about 60% or more, about 70% or more, about 80% or more, about 90% or more, relative to the baseline hair count. In some embodiments, the hair count is increased by about 100% or more, increased by about 250% or more, increased by about 500% or more, increased by about 750% or more, or increased by about 1000% or more, relative to the baseline hair count. In some embodiments, the hair count is increased by no more than about 2.5%, no more than about 5%, or no more than about 7.5%, relative to the baseline hair count. In some embodiments, the hair count is increased by no more than about 10%, relative to the baseline hair count. In some embodiments, the hair count is increased by no more than about 20%, no more than about 30%, no more than about 40%, no more than about 50%, no more than about 60%, no more than about 70%, no more than about 80%, no more than about 90%, or no more than about 100% relative to the baseline hair count. In some embodiments, the hair count is increased by no more than about 100%, increased by no more than about 250%, increased by no more than about 500%, increased by no more than about 750%, or increased by no more than about 1000%, relative to the baseline hair count. In some embodiments, the hair count is increased by 2.5%, 5%, 7.5%, 10%, 20%, 30%, 40%, 50%, 60%, 70%, 80%, 90%, 100%, 250%, 500%, 750%, or 1000%, or by a range defined by any of the two aforementioned percentages.

[0194] In some embodiments, the measurement is a hair thickness measurement. In some embodiments, the hair thickness measurement is determined in an area of skin. In some embodiments, the hair thickness measurement comprises a width of an individual hair. In some embodiments, the hair thickness measurement comprises widths of multiple individual hairs. In some embodiments, the hair thickness measurement comprises an average of the widths of the multiple individual hairs. In some embodiments, the hair thickness measurement comprises a median of the widths of the multiple individual hairs. The hair thickness measurement may include a vellus hair thickness measurement. The hair thickness measurement may include a non-vellus hair thickness measurement. In some embodiments, the hair thickness measurement is assessed using photography. In some embodiments, the hair thickness measurement is assessed by phototrichogram. In some embodiments, the hair thickness measurement is assessed by a macrophotography analysis.

[0195] In some embodiments, the composition increases the hair thickness measurement relative to the baseline hair thickness measurement. In some embodiments, the increase is measured in a second tissue sample (e.g. a skin sample as described herein) obtained from the subject after administering the composition to the subject. In some embodiments, the increase is measured directly on the subject after administering the composition to the subject. In some embodiments, the hair thickness measurement is increased by about 2.5% or more, about 5% or more, or about 7.5% or more, relative to the baseline hair thickness measurement. In some embodiments, the hair thickness measurement is increased by about 10% or more, relative to the baseline hair thickness measurement. In some embodiments, the hair thickness measurement is increased by about 20% or more, about 30% or more, about 40% or more, about 50% or more, about 60% or more, about 70% or more, about 80% or more, about 90% or more, relative to the baseline hair thickness measurement. In some embodiments, the hair thickness measurement is increased by about 100% or more, increased by about 250% or more, increased by about 500% or more, increased by about 750% or more, or increased by about 1000% or more, relative to the baseline hair thickness measurement. In some embodiments, the hair thickness measurement is increased by no more than about 2.5%, no more than about 5%, or no more than about 7.5%, relative to the baseline hair thickness measurement. In some embodiments, the hair thickness measurement is increased by no more than about 10%, relative to the baseline hair thickness measurement. In some embodiments, the hair thickness measurement is increased by no more than about 20%, no more than about 30%, no more than about 40%, no more than about 50%, no more than about 60%, no more than about 70%, no more than about 80%, no more than about 90%, or no more than about 100% relative to the baseline hair thickness measurement. In some embodiments, the hair thickness measurement is increased by no more than about 100%, increased by no more than about 250%, increased by no more than about 500%, increased by no more than about 750%, or increased by no more than about 1000%, relative to the baseline hair thickness measurement. In some embodiments, the hair thickness measurement is increased by 2.5%, 5%, 7.5%, 10%, 20%, 30%, 40%, 50%, 60%, 70%, 80%, 90%, 100%, 250%, 500%, 750%, or 1000%, or by a range defined by any of the two aforementioned percentages.

[0196] In some embodiments, the measurement is a hair density measurement. In some embodiments, the hair density measurement is determined in an area of skin. In some embodiments, the hair density measurement comprises a number of hair in the area of skin. In some embodiments, the hair density measurement comprises the number of hair in the area of skin divided by the area of skin. The hair density measurement may include a vellus hair density measurement. The hair density measurement may include a non-vellus hair density measurement. In some embodiments, the hair density measurement is assessed using photography. In some embodiments, the hair density measurement is assessed by phototrichogram. In some embodiments, the hair density measurement is assessed by a macrophotography analysis.

[0197] In some embodiments, the composition increases the hair density measurement relative to the baseline hair density measurement. In some embodiments, the increase is measured in a second tissue sample (e.g. a skin sample as described herein) obtained from the subject after administering the composition to the subject. In some embodiments, the increase is measured directly on the subject after administering the composition to the subject. In some embodiments, the hair density measurement is increased by about 2.5% or more, about 5% or more, or about 7.5% or more, relative to the baseline hair density measurement. In some embodiments, the hair density measurement is increased by about 10% or more, relative to the baseline hair density measurement. In some embodiments, the hair density measurement is increased by about 20% or more, about 30% or more, about 40% or more, about 50% or more, about 60% or more, about 70% or more, about 80% or more, about 90% or more, relative to the baseline hair density measurement. In some embodiments, the hair density measurement is increased by about 100% or more, increased by about 250% or more, increased by about 500% or more, increased by about 750% or more, or increased by about 1000% or more, relative to the baseline hair density measurement. In some embodiments, the hair density measurement is increased by no more than about 2.5%, no more than about 5%, or no more than about 7.5%, relative to the baseline hair density measurement. In some embodiments, the hair density measurement is increased by no more than about 10%, relative to the baseline hair density measurement. In some embodiments, the hair density measurement is increased by no more than about 20%, no more than about 30%, no more than about 40%, no more than about 50%, no more than about 60%, no more than about 70%, no more than about 80%, no more than about 90%, or no more than about 100% relative to the baseline hair density measurement. In some embodiments, the hair density measurement is increased by no more than about 100%, increased by no more than about 250%, increased by no more than about 500%, increased by no more than about 750%, or increased by no more than about 1000%, relative to the baseline hair density measurement. In some embodiments, the hair density measurement is increased by 2.5%, 5%, 7.5%, 10%, 20%, 30%, 40%, 50%, 60%, 70%, 80%, 90%, 100%, 250%, 500%, 750%, or 1000%, or by a range defined by any of the two aforementioned percentages.

[0198] In some embodiments, the measurement is a number of hair follicles. In some embodiments, the number of hair follicles is a total number of hair follicles. In some embodiments, the number of hair follicles include a number of terminal hair follicles. In some embodiments, the number of hair follicles include a number of anagen hair follicles. In some embodiments, the number of hair follicles include a number of telogen hair follicles. In some embodiments, the number of hair follicles include a number of catagen hair follicles. In some embodiments, the number of hair follicles include a number of miniaturized hair follicles. In some embodiments, the number of hair follicles include a number of vellus miniaturized hair follicles. In some embodiments, the number of hair follicles include a number of vellus-like miniaturized hair follicles. In some embodiments, the number of hair follicles include a number of indeterminate hair follicles. In some embodiments, the number of hair follicles is determined in an area of skin. In some embodiments, the number of hair follicles is normalized based on the area of skin. In some embodiments, the number of hair follicles is assessed in a biopsy, such as a scalp biopsy. In some embodiments, the number of hair follicles is assessed using photography.

[0199] In some embodiments, the composition increases the number of hair follicles relative to the baseline number of hair follicles. In some embodiments, the increase is measured in a second tissue sample (e.g. a skin sample as described herein) obtained from the subject after administering the composition to the subject. In some embodiments, the increase is measured directly on the subject after administering the composition to the subject. In some embodiments, the number of hair follicles is increased by about 2.5% or more, about 5% or more, or about 7.5% or more, relative to the baseline number of hair follicles. In some embodiments, the number of hair follicles is increased by about 10% or more, relative to the baseline number of hair follicles. In some embodiments, the number of hair follicles is increased by about 20% or more, about 30% or more, about 40% or more, about 50% or more, about 60% or more, about 70% or more, about 80% or more, about 90% or more, relative to the baseline number of hair follicles. In some embodiments, the number of hair follicles is increased by about 100% or more, increased by about 250% or more, increased by about 500% or more, increased by about 750% or more, or increased by about 1000% or more, relative to the baseline number of hair follicles. In some embodiments, the number of hair follicles is increased by no more than about 2.5%, no more than about 5%, or no more than about 7.5%, relative to the baseline number of hair follicles. In some embodiments, the number of hair follicles is increased by no more than about 10%, relative to the baseline number of hair follicles. In some embodiments, the number of hair follicles is increased by no more than about 20%, no more than about 30%, no more than about 40%, no more than about 50%, no more than about 60%, no more than about 70%, no more than about 80%, no more than about 90%, or no more than about 100% relative to the baseline number of hair follicles. In some embodiments, the number of hair follicles is increased by no more than about 100%, increased by no more than about 250%, increased by no more than about 500%, increased by no more than about 750%, or increased by no more than about 1000%, relative to the baseline number of hair follicles. In some embodiments, the number of hair follicles is increased by 2.5%, 5%, 7.5%, 10%, 20%, 30%, 40%, 50%, 60%, 70%, 80%, 90%, 100%, 250%, 500%, 750%, or 1000%, or by a range defined by any of the two aforementioned percentages.

[0200] In some embodiments, the measurement is a protein level. In some embodiments, the protein level is a β-catenin protein level. In some embodiments, the protein level is a α-SMA protein level. In some embodiments, the protein level is a collagen protein level. In some embodiments, the collagen of the collagen protein level is collagen I. In some embodiments, the collagen of the collagen protein level is collagen III. In some embodiments, the protein level is assessed in a sample such as a skin sample. In some embodiments, the protein level is indicated as a mass or percentage of protein per sample weight. In some embodiments, the protein level is indicated as a mass or percentage of protein per sample volume. In some embodiments, the protein level is indicated as a mass or percentage of protein per total protein within the sample. In some embodiments, the protein measurement is a circulating protein measurement. In some embodiments, the protein measurement is obtained by an assay such as an immunoassay, a colorimetric assay, or a fluorescence assay.

[0201] In some embodiments, the measurement is a hair color measurement. In some embodiments, the hair color measurement is determined in an area of skin. In some embodiments, the hair color measurement comprises a color of an individual hair. In some embodiments, the hair color measurement comprises colors of multiple individual hairs. In some embodiments, the hair color measurement comprises an average of the colors of the multiple individual hairs. In some embodiments, the hair color measurement comprises a median of the colors of the multiple individual hairs. The hair color measurement may include a measurement of how gray the har is, or how gray the hairs are. The hair color measurement may include a measurement of how much color is in the hair, or how much color is in the hairs. The hair color measurement may include a measurement of how white the har is, or how white the hairs are. The hair color measurement may include a hair pigmentation measurement. The hair color measurement may include a hair contrast measurement. The hair color measurement may include a vellus hair color measurement. The hair color measurement may include a non-vellus hair color measurement. In some embodiments, the hair color measurement is assessed using photography. In some embodiments, the hair color measurement is assessed by phototrichogram. In some embodiments, the hair color measurement is assessed by a macrophotography analysis. The hair color measurement may be a qualitative measurement. The hair color measurement may be a quantitative measurement. The hair color measurement may be a number, such as an amount of hair color. The hair color measurement may be a rate, such as a rate of hair color loss.

[0202] In some embodiments, the composition increases the hair color measurement relative to the baseline hair color measurement. In some embodiments, the increase is measured in a second tissue sample (e.g. a skin sample as described herein) obtained from the subject after administering the composition to the subject. In some embodiments, the increase is measured directly on the subject after administering the composition to the subject. In some embodiments, the hair color measurement is increased by about 2.5% or more, about 5% or more, or about 7.5% or more, relative to the baseline hair color measurement. In some embodiments, the hair color measurement is increased by about 10% or more, relative to the baseline hair color measurement. In some embodiments, the hair color measurement is increased by about 20% or more, about 30% or more, about 40% or more, about 50% or more, about 60% or more, about 70% or more, about 80% or more, about 90% or more, relative to the baseline hair color measurement. In some embodiments, the hair color measurement is increased by about 100% or more, increased by about 250% or more, increased by about 500% or more, increased by about 750% or more, or increased by about 1000% or more, relative to the baseline hair color measurement. In some embodiments, the hair color measurement is increased by no more than about 2.5%, no more than about 5%, or no more than about 7.5%, relative to the baseline hair color measurement. In some embodiments, the hair color measurement is increased by no more than about 10%, relative to the baseline hair color measurement. In some embodiments, the hair color measurement is increased by no more than about 20%, no more than about 30%, no more than about 40%, no more than about 50%, no more than about 60%, no more than about 70%, no more than about 80%, no more than about 90%, or no more than about 100% relative to the baseline hair color measurement. In some embodiments, the hair color measurement is increased by no more than about 100%, increased by no more than about 250%, increased by no more than about 500%, increased by no more than about 750%, or increased by no more than about 1000%, relative to the baseline hair color measurement. In some embodiments, the hair color measurement is increased by 2.5%, 5%, 7.5%, 10%, 20%, 30%, 40%, 50%, 60%, 70%, 80%, 90%, 100%, 250%, 500%, 750%, or 1000%, or by a range defined by any of the two aforementioned percentages.

[0203] In some embodiments, the composition reduces the protein level relative to the baseline protein level. In some embodiments, the reduction is measured in a second tissue or fluid sample (e.g. a skin, blood, serum, or plasma sample as described herein) obtained from the subject after administering the composition to the subject. In some embodiments, the protein level is decreased by about 2.5% or more, about 5% or more, or about 7.5% or more, relative to the baseline protein level. In some embodiments, the protein level is decreased by about 10% or more, relative to the baseline protein level. In some embodiments, the protein level is decreased by about 20% or more, about 30% or more, about 40% or more, about 50% or more, about 60% or more, about 70% or more, about 80% or more, about 90% or more, relative to the baseline protein level. In some embodiments, the protein level is decreased by no more than about 2.5%, no more than about 5%, or no more than about 7.5%, relative to the baseline protein level. In some embodiments, the protein level is decreased by no more than about 10%, relative to the baseline protein level. In some embodiments, the protein level is decreased by no more than about 20%, no more than about 30%, no more than about 40%, no more than about 50%, no more than about 60%, no more than about 70%, no more than about 80%, no more than about 90%, or no more than about 100% relative to the baseline protein level. In some embodiments, the protein level is decreased by 2.5%, 5%, 7.5%, 10%, 20%, 30%, 40%, 50%, 60%, 70%, 80%, 90%, or 100%, or by a range defined by any of the two aforementioned percentages.

[0204] In some embodiments, the composition increases the protein level relative to the baseline protein level. In some embodiments, the increase is measured in a second tissue or fluid sample (e.g. a skin, blood, serum, or plasma sample as described herein) obtained from the subject after administering the composition to the subject. In some embodiments, the protein level is increased by about 2.5% or more, about 5% or more, or about 7.5% or more, relative to the baseline protein level. In some embodiments, the protein level is increased by about 10% or more, relative to the baseline protein level. In some embodiments, the protein level is increased by about 20% or more, about 30% or more, about 40% or more, about 50% or more, about 60% or more, about 70% or more, about 80% or more, about 90% or more, relative to the baseline protein level. In some embodiments, the protein level is increased by about 100% or more, increased by about 250% or more, increased by about 500% or more, increased by about 750% or more, or increased by about 1000% or more, relative to the baseline protein level. In some embodiments, the protein level is increased by no more than about 2.5%, no more than about 5%, or no more than about 7.5%, relative to the baseline protein level. In some embodiments, the protein level is increased by no more than about 10%, relative to the baseline protein level. In some embodiments, the protein level is increased by no more than about 20%, no more than about 30%, no more than about 40%, no more than about 50%, no more than about 60%, no more than about 70%, no more than about 80%, no more than about 90%, or no more than about 100% relative to the baseline protein level. In some embodiments, the protein level is increased by no more than about 100%, increased by no more than about 250%, increased by no more than about 500%, increased by no more than about 750%, or increased by no more than about 1000%, relative to the baseline protein level. In some embodiments, the protein level is increased by 2.5%, 5%, 7.5%, 10%, 20%, 30%, 40%, 50%, 60%, 70%, 80%, 90%, 100%, 250%, 500%, 750%, or 1000%, or by a range defined by any of the two aforementioned percentages.

[0205] In some embodiments, the measurement is a mRNA level. In some embodiments, the mRNA level is a β-catenin mRNA level. In some embodiments, the mRNA level is a α-SMA mRNA level. In some embodiments, the mRNA level is a collagen mRNA level. In some embodiments, the collagen of the collagen mRNA level is collagen I. In some embodiments, the collagen of the collagen mRNA level is collagen III. In some embodiments, the mRNA level is assessed in a sample such as a skin sample. In some embodiments, the mRNA level is indicated as a mass or percentage of mRNA per sample weight. In some embodiments, the mRNA level is indicated as a mass or percentage of mRNA per sample volume. In some embodiments, the mRNA level is indicated as a mass or percentage of mRNA per total mRNA within the sample. In some embodiments, the mRNA level is indicated as a mass or percentage of mRNA per total nucleic acids within the sample. In some embodiments, the mRNA level is indicated relative to another mRNA level, such as an mRNA level of a housekeeping gene, within the sample. In some embodiments, the mRNA measurement is obtained by an assay such as a polymerase chain reaction (PCR) assay. In some embodiments, the PCR comprises quantitative PCR (qPCR). In some embodiments, the PCR comprises reverse transcription of the mRNA.

[0206] In some embodiments, the composition reduces the mRNA level relative to the baseline mRNA level. In some embodiments, the reduction is measured in a second tissue sample (e.g. a skin sample as described herein) obtained from the subject after administering the composition to the subject. In some embodiments, the mRNA level is decreased by about 2.5% or more, about 5% or more, or about 7.5% or more, relative to the baseline mRNA level. In some embodiments, the mRNA level is decreased by about 10% or more, relative to the baseline mRNA level. In some embodiments, the mRNA level is decreased by about 20% or more, about 30% or more, about 40% or more, about 50% or more, about 60% or more, about 70% or more, about 80% or more, about 90% or more, relative to the baseline mRNA level. In some embodiments, the mRNA level is decreased by no more than about 2.5%, no more than about 5%, or no more than about 7.5%, relative to the baseline mRNA level. In some embodiments, the mRNA level is decreased by no more than about 10%, relative to the baseline mRNA level. In some embodiments, the mRNA level is decreased by no more than about 20%, no more than about 30%, no more than about 40%, no more than about 50%, no more than about 60%, no more than about 70%, no more than about 80%, no more than about 90%, or no more than about 100% relative to the baseline mRNA level. In some embodiments, the mRNA level is decreased by 2.5%, 5%, 7.5%1, 0%, 20%, 30%, 40%, 50%, 60%, 70%, 80%, 90%, or 100%, or by a range defined by any of the two aforementioned percentages.

[0207] In some embodiments, the composition increases the mRNA level relative to the baseline mRNA level. In some embodiments, the increase is measured in a second tissue sample (e.g. a skin sample as described herein) obtained from the subject after administering the composition to the subject. In some embodiments, the mRNA level is increased by about 2.5% or more, about 5% or more, or about 7.5% or more, relative to the baseline mRNA level. In some embodiments, the mRNA level is increased by about 10% or more, relative to the baseline mRNA level. In some embodiments, the mRNA level is increased by about 20% or more, about 30% or more, about 40% or more, about 50% or more, about 60% or more, about 70% or more, about 80% or more, about 90% or more, relative to the baseline mRNA level. In some embodiments, the mRNA level is increased by about 100% or more, increased by about 250% or more, increased by about 500% or more, increased by about 750% or more, or increased by about 1000% or more, relative to the baseline mRNA level. In some embodiments, the mRNA level is increased by no more than about 2.5%, no more than about 5%, or no more than about 7.5%, relative to the baseline mRNA level. In some embodiments, the mRNA level is increased by no more than about 10%, relative to the baseline mRNA level. In some embodiments, the mRNA level is increased by no more than about 20%, no more than about 30%, no more than about 40%, no more than about 50%, no more than about 60%, no more than about 70%, no more than about 80%, no more than about 90%, or no more than about 100% relative to the baseline mRNA level. In some embodiments, the mRNA level is increased by no more than about 100%, increased by no more than about 250%, increased by no more than about 500%, increased by no more than about 750%, or increased by no more than about 1000%, relative to the baseline mRNA level. In some embodiments, the mRNA level is increased by 2.5%, 5%, 7.5%, 10, 20%, 30%, 40%, 50%, 60%, 70%, 80%, 90%, 100%, 250%, 500%, 750%, or 1000%, or by a range defined by any of the two aforementioned percentages.

[0208] In some embodiments, the measurement is a DKK2 protein measurement. In some embodiments, the DKK2 protein measurement comprises a DKK2 protein level. In some embodiments, the DKK2 protein level is assessed in a sample such as a skin sample or a fluid sample (e.g. blood, serum, or plasma). In some embodiments, the DKK2 protein level is indicated as a mass or percentage of DKK2 protein per sample weight. In some embodiments, the DKK2 protein level is indicated as a mass or percentage of DKK2 protein per sample volume. In some embodiments, the DKK2 protein level is indicated as a mass or percentage of DKK2 protein per total protein within the sample. In some embodiments, the DKK2 protein measurement is a circulating DKK2 protein measurement. In some embodiments, the DKK2 protein measurement is obtained by an assay such as an immunoassay, a colorimetric assay, or a fluorescence assay.

[0209] In some embodiments, the composition reduces the DKK2 protein level relative to the baseline DKK2 protein level. In some embodiments, the reduction is measured in a second tissue or fluid sample (e.g. a skin, blood, serum, or plasma sample as described herein) obtained from the subject after administering the composition to the subject. In some embodiments, the DKK2 protein level is decreased by about 2.5% or more, about 5% or more, or about 7.5% or more, relative to the baseline DKK2 protein level. In some embodiments, the DKK2 protein level is decreased by about 10% or more, relative to the baseline DKK2 protein level. In some embodiments, the DKK2 protein level is decreased by about 20% or more, about 30% or more, about 40% or more, about 50% or more, about 60% or more, about 70% or more, about 80% or more, about 90% or more, relative to the baseline DKK2 protein level. In some embodiments, the DKK2 protein level is decreased by no more than about 2.5%, no more than about 5%, or no more than about 7.5%, relative to the baseline DKK2 protein level. In some embodiments, the DKK2 protein level is decreased by no more than about 10%, relative to the baseline DKK2 protein level. In some embodiments, the DKK2 protein level is decreased by no more than about 20%, no more than about 30%, no more than about 40%, no more than about 50%, no more than about 60%, no more than about 70%, no more than about 80%, no more than about 90%, or no more than about 100% relative to the baseline DKK2 protein level. In some embodiments, the DKK2 protein level is decreased by 2.5%, 5%, 7.5%, 10%, 20%, 30%, 40%, 50%, 60%, 70%, 80%, 90%, or 100%, or by a range defined by any of the two aforementioned percentages.

[0210] In some embodiments, the measurement is a DKK2 mRNA measurement. In some embodiments, the DKK2 mRNA measurement comprises a DKK2 mRNA level. In some embodiments, the DKK2 mRNA level is assessed in a sample such as a skin sample. In some embodiments, the DKK2 mRNA level is indicated as a mass or percentage of DKK2 mRNA per sample weight. In some embodiments, the DKK2 mRNA level is indicated as a mass or percentage of DKK2 mRNA per sample volume. In some embodiments, the DKK2 mRNA level is indicated as a mass or percentage of DKK2 mRNA per total mRNA within the sample. In some embodiments, the DKK2 mRNA level is indicated as a mass or percentage of DKK2 mRNA per total nucleic acids within the sample. In some embodiments, the DKK2 mRNA level is indicated relative to another mRNA level, such as an mRNA level of a housekeeping gene, within the sample. In some embodiments, the DKK2 mRNA measurement is obtained by an assay such as a polymerase chain reaction (PCR) assay. In some embodiments, the PCR comprises quantitative PCR (qPCR). In some embodiments, the PCR comprises reverse transcription of the DKK2 mRNA.

[0211] In some embodiments, the composition reduces the DKK2 mRNA level relative to the baseline DKK2 mRNA level. In some embodiments, the reduction is measured in a second tissue sample (e.g. a skin sample as described herein) obtained from the subject after administering the composition to the subject. In some embodiments, the DKK2 mRNA level is decreased by about 2.5% or more, about 5% or more, or about 7.5% or more, relative to the baseline DKK2 mRNA level. In some embodiments, the DKK2 mRNA level is decreased by about 10% or more, relative to the baseline DKK2 mRNA level. In some embodiments, the DKK2 mRNA level is decreased by about 20% or more, about 30% or more, about 40% or more, about 50% or more, about 60% or more, about 70% or more, about 80% or more, about 90% or more, relative to the baseline DKK2 mRNA level. In some embodiments, the DKK2 mRNA level is decreased by no more than about 2.5%, no more than about 5%, or no more than about 7.5%, relative to the baseline DKK2 mRNA level. In some embodiments, the DKK2 mRNA level is decreased by no more than about 10%, relative to the baseline DKK2 mRNA level. In some embodiments, the DKK2 mRNA level is decreased by no more than about 20%, no more than about 30%, no more than about 40%, no more than about 50%, no more than about 60%, no more than about 70%, no more than about 80%, no more than about 90%, or no more than about 100% relative to the baseline DKK2 mRNA level. In some embodiments, the DKK2 mRNA level is decreased by 2.5%, 5%, 7.5%, 10%, 20%, 30%, 40%, 50%, 60%, 70%, 80%, 90%, or 100%, or by a range defined by any of the two aforementioned percentages.

### III. Definitions

[0212] Unless defined otherwise, all terms of art, notations and other technical and scientific terms or terminology used herein are intended to have the same meaning as is commonly understood by one of ordinary skill in the art to which the claimed subject matter pertains. In some cases, terms with commonly understood meanings are defined herein for clarity and/or for ready reference, and the inclusion of such definitions herein should not necessarily be construed to represent a substantial difference over what is generally understood in the art.

[0213] Throughout this application, various embodiments may be presented in a range format. It should be understood that the description in range format is merely for convenience and brevity and should not be construed as an inflexible limitation on the scope of the disclosure. Accordingly, the description of a range should be considered to have specifically disclosed all the possible subranges as well as individual numerical values within that range. For example, description of a range such as from 1 to 6 should be considered to have specifically disclosed subranges such as from 1 to 3, from 1 to 4, from 1 to 5, from 2 to 4, from 2 to 6, from 3 to 6 etc., as well as individual numbers within that range, for example, 1, 2, 3, 4, 5, and 6. This applies regardless of the breadth of the range.

[0214] As used in the specification and claims, the singular forms “a”, “an” and “the” include plural references unless the context clearly dictates otherwise. For example, the term “a sample” includes a plurality of samples, including mixtures thereof.

[0215] The terms “determining,” “measuring,” “evaluating,” “assessing,” “assaying,” and “analyzing” are often used interchangeably herein to refer to forms of measurement. The terms include determining if an element is present or not (for example, detection). These terms can include quantitative, qualitative or quantitative and qualitative determinations. Assessing can be relative or absolute. “Detecting the presence of” can include determining the amount of something present in addition to determining whether it is present or absent depending on the context.

[0216] The terms “subject,” and “patient” may be used interchangeably herein. A “subject” can be a biological entity containing expressed genetic materials. The biological entity can be a plant, animal, or microorganism, including, for example, bacteria, viruses, fungi, and protozoa. The subject can be a mammal. The mammal can be a human. The subject may be diagnosed or suspected of being at high risk for a disease. In some cases, the subject is not necessarily diagnosed or suspected of being at high risk for the disease.

[0217] As used herein, the term “about” a number refers to that number plus or minus 10% of that number. The term “about” a range refers to that range minus 10% of its lowest value and plus 10% of its greatest value.

[0218] As used herein, the terms “treatment” or “treating” are used in reference to a pharmaceutical or other intervention regimen for obtaining beneficial or desired results in the recipient. Beneficial or desired results include but are not limited to a therapeutic benefit and/or a prophylactic benefit. A therapeutic benefit may refer to eradication or amelioration of symptoms or of an underlying disorder being treated. Also, a therapeutic benefit can be achieved with the eradication or amelioration of one or more of the physiological symptoms associated with the underlying disorder such that an improvement is observed in the subject, notwithstanding that the subject may still be afflicted with the underlying disorder. A prophylactic effect includes delaying, preventing, or eliminating the appearance of a disease or condition, delaying or eliminating the onset of symptoms of a disease or condition, slowing, halting, or reversing the progression of a disease or condition, or any combination thereof. For prophylactic benefit, a subject at risk of developing a particular disease, or to a subject reporting one or more of the physiological symptoms of a disease may undergo treatment, even though a diagnosis of this disease may not have been made.

[0219] Some embodiments refer to nucleic acid sequence information. In some embodiments, any uracil (U) may be interchanged with any thymine (T), and vice versa. For example, in an siRNA with a nucleic acid sequence comprising one or more Us, in some embodiments any of the Us may be replaced with Ts. Similarly, in an siRNA with a nucleic acid sequence comprising one or more Ts, in some embodiments any of the Ts may be replaced with Us. In some embodiments, an oligonucleotide such as an siRNA disclosed herein comprises or consists of RNA. In some embodiments, the oligonucleotide may comprise or consist of DNA.

[0220] The section headings used herein are for organizational purposes only and are not to be construed as limiting the subject matter described.

### IV. Sequence Information

[0221] Some embodiments include one or more nucleic acid sequences in the following table:

TABLE 2A
Sequence Information

| SEQ | |
|---|---|
| ID NO: | Description |
| 1-3636 | Example DKK2 siRNA sense strand sequences |
| 3637-7272 | Example DKK2 siRNA antisense strand sequences |
| 7273-7312 | Example modified DKK2 siRNA sense strand sequences |
| 7313-7352 | Example modified DKK2 siRNA antisense strand sequences |
| 7353-7558 | Example alternatively modified DKK2 siRNA sense strand |
| | sequences |
| 7559-7578 | Example modified siRNA sense strand sequences |
| 7579-7598 | Example modified siRNA antisense strand sequences |
| 7599 | Full-length human DKK2 mRNA sequence (Ensembl genome |
| | browser ref. ENST00000285311) (human RNA): |
| 7600-7641 | Modification pattern 1S to42S |
| 7642-7646 | Modification pattern 1AS to 5AS |
| 7647 | Modification pattern ASO1 |

TABLE 2B
Example siRNAs with Sequences

| siRNA | SEQ ID | | SEQ ID | |
|---|---|---|---|---|
| Name | NO: | Sense strand sequence (5′-3′) | NO: | Antisense strand sequence (5′-3′) |
| siRNA 1 | 1 | AGCAGAGAGAGAGAAAGCG | 3637 | CGCUUUCUCUCUCUCUGCU |
| siRNA 2 | 2 | GCAGAGAGAGAGAAAGCGG | 3638 | CCGCUUUCUCUCUCUCUGC |
| siRNA 3 | 3 | CAGAGAGAGAGAAAGCGGG | 3639 | CCCGCUUUCUCUCUCUCUG |
| siRNA 4 | 4 | AGAGAGAGAGAAAGCGGGA | 3640 | UCCCGCUUUCUCUCUCUCU |
| siRNA 5 | 5 | GAGAGAGAGAAAGCGGGAG | 3641 | CUCCCGCUUUCUCUCUCUC |
| siRNA 6 | 6 | AGAGAGAGAAAGCGGGAGC | 3642 | GCUCCCGCUUUCUCUCUCU |
| siRNA 7 | 7 | GAGAGAGAAAGCGGGAGCC | 3643 | GGCUCCCGCUUUCUCUCUC |
| siRNA 8 | 8 | AGAGAGAAAGCGGGAGCCC | 3644 | GGGCUCCCGCUUUCUCUCU |
| siRNA 9 | 9 | GAGAGAAAGCGGGAGCCCG | 3645 | CGGGCUCCCGCUUUCUCUC |
| siRNA 10 | 10 | AGAGAAAGCGGGAGCCCGC | 3646 | GCGGGCUCCCGCUUUCUCU |
| siRNA 11 | 11 | GAGAAAGCGGGAGCCCGCG | 3647 | CGCGGGCUCCCGCUUUCUC |
| siRNA 12 | 12 | AGAAAGCGGGAGCCCGCGG | 3648 | CCGCGGGCUCCCGCUUUCU |
| siRNA 13 | 13 | GAAAGCGGGAGCCCGCGGC | 3649 | GCCGCGGGCUCCCGCUUUC |
| siRNA 14 | 14 | AAAGCGGGAGCCCGCGGCG | 3650 | CGCCGCGGGCUCCCGCUUU |
| siRNA 15 | 15 | AAGCGGGAGCCCGCGGCGA | 3651 | UCGCCGCGGGCUCCCGCUU |
| siRNA 16 | 16 | AGCGGGAGCCCGCGGCGAG | 3652 | CUCGCCGCGGGCUCCCGCU |
| siRNA 17 | 17 | GCGGGAGCCCGCGGCGAGC | 3653 | GCUCGCCGCGGGCUCCCGC |
| siRNA 18 | 18 | CGGGAGCCCGCGGCGAGCG | 3654 | CGCUCGCCGCGGGCUCCCG |
| siRNA 19 | 19 | GGGAGCCCGCGGCGAGCGU | 3655 | ACGCUCGCCGCGGGCUCCC |
| siRNA 20 | 20 | GGAGCCCGCGGCGAGCGUA | 3656 | UACGCUCGCCGCGGGCUCC |
| siRNA 21 | 21 | GAGCCCGCGGCGAGCGUAG | 3657 | CUACGCUCGCCGCGGGCUC |
| siRNA 22 | 22 | AGCCCGCGGCGAGCGUAGC | 3658 | GCUACGCUCGCCGCGGGCU |
| siRNA 23 | 23 | GCCCGCGGCGAGCGUAGCG | 3659 | CGCUACGCUCGCCGCGGGC |
| siRNA 24 | 24 | CCCGCGGCGAGCGUAGCGC | 3660 | GCGCUACGCUCGCCGCGGG |
| siRNA 25 | 25 | CCGCGGCGAGCGUAGCGCA | 3661 | UGCGCUACGCUCGCCGCGG |
| siRNA 26 | 26 | CGCGGCGAGCGUAGCGCAA | 3662 | UUGCGCUACGCUCGCCGCG |
| siRNA 27 | 27 | GCGGCGAGCGUAGCGCAAG | 3663 | CUUGCGCUACGCUCGCCGC |
| siRNA 28 | 28 | CGGCGAGCGUAGCGCAAGU | 3664 | ACUUGCGCUACGCUCGCCG |
| siRNA 29 | 29 | GGCGAGCGUAGCGCAAGUC | 3665 | GACUUGCGCUACGCUCGCC |
| siRNA 30 | 30 | GCGAGCGUAGCGCAAGUCC | 3666 | GGACUUGCGCUACGCUCGC |
| siRNA 31 | 31 | CGAGCGUAGCGCAAGUCCG | 3667 | CGGACUUGCGCUACGCUCG |
| siRNA 32 | 32 | GAGCGUAGCGCAAGUCCGC | 3668 | GCGGACUUGCGCUACGCUC |
| siRNA 33 | 33 | AGCGUAGCGCAAGUCCGCU | 3669 | AGCGGACUUGCGCUACGCU |
| siRNA 34 | 34 | GCGUAGCGCAAGUCCGCUC | 3670 | GAGCGGACUUGCGCUACGC |
| siRNA 35 | 35 | CGUAGCGCAAGUCCGCUCC | 3671 | GGAGCGGACUUGCGCUACG |
| siRNA 36 | 36 | GUAGCGCAAGUCCGCUCCC | 3672 | GGGAGCGGACUUGCGCUAC |
| siRNA 37 | 37 | UAGCGCAAGUCCGCUCCCU | 3673 | AGGGAGCGGACUUGCGCUA |
| siRNA 38 | 38 | AGCGCAAGUCCGCUCCCUA | 3674 | UAGGGAGCGGACUUGCGCU |
| siRNA 39 | 39 | GCGCAAGUCCGCUCCCUAG | 3675 | CUAGGGAGCGGACUUGCGC |
| siRNA 40 | 40 | CGCAAGUCCGCUCCCUAGG | 3676 | CCUAGGGAGCGGACUUGCG |
| siRNA 41 | 41 | GCAAGUCCGCUCCCUAGGC | 3677 | GCCUAGGGAGCGGACUUGC |
| siRNA 42 | 42 | CAAGUCCGCUCCCUAGGCA | 3678 | UGCCUAGGGAGCGGACUUG |
| siRNA 43 | 43 | AAGUCCGCUCCCUAGGCAU | 3679 | AUGCCUAGGGAGCGGACUU |
| siRNA 44 | 44 | AGUCCGCUCCCUAGGCAUC | 3680 | GAUGCCUAGGGAGCGGACU |
| siRNA 45 | 45 | GUCCGCUCCCUAGGCAUCG | 3681 | CGAUGCCUAGGGAGCGGAC |
| siRNA 46 | 46 | UCCGCUCCCUAGGCAUCGC | 3682 | GCGAUGCCUAGGGAGCGGA |
| siRNA 47 | 47 | CCGCUCCCUAGGCAUCGCU | 3683 | AGCGAUGCCUAGGGAGCGG |
| siRNA 48 | 48 | CGCUCCCUAGGCAUCGCUG | 3684 | CAGCGAUGCCUAGGGAGCG |
| siRNA 49 | 49 | GCUCCCUAGGCAUCGCUGC | 3685 | GCAGCGAUGCCUAGGGAGC |
| siRNA 50 | 50 | CUCCCUAGGCAUCGCUGCG | 3686 | CGCAGCGAUGCCUAGGGAG |
| siRNA 51 | 51 | UCCCUAGGCAUCGCUGCGC | 3687 | GCGCAGCGAUGCCUAGGGA |
| siRNA 52 | 52 | CCCUAGGCAUCGCUGCGCU | 3688 | AGCGCAGCGAUGCCUAGGG |
| siRNA 53 | 53 | CCUAGGCAUCGCUGCGCUG | 3689 | CAGCGCAGCGAUGCCUAGG |
| siRNA 54 | 54 | CUAGGCAUCGCUGCGCUGG | 3690 | CCAGCGCAGCGAUGCCUAG |
| siRNA 55 | 55 | UAGGCAUCGCUGCGCUGGC | 3691 | GCCAGCGCAGCGAUGCCUA |
| siRNA 56 | 56 | AGGCAUCGCUGCGCUGGCA | 3692 | UGCCAGCGCAGCGAUGCCU |
| siRNA 57 | 57 | GGCAUCGCUGCGCUGGCAG | 3693 | CUGCCAGCGCAGCGAUGCC |
| siRNA 58 | 58 | GCAUCGCUGCGCUGGCAGC | 3694 | GCUGCCAGCGCAGCGAUGC |
| siRNA 59 | 59 | CAUCGCUGCGCUGGCAGCG | 3695 | CGCUGCCAGCGCAGCGAUG |
| siRNA 60 | 60 | AUCGCUGCGCUGGCAGCGA | 3696 | UCGCUGCCAGCGCAGCGAU |
| siRNA 61 | 61 | UCGCUGCGCUGGCAGCGAU | 3697 | AUCGCUGCCAGCGCAGCGA |
| siRNA 62 | 62 | CGCUGCGCUGGCAGCGAUU | 3698 | AAUCGCUGCCAGCGCAGCG |
| siRNA 63 | 63 | GCUGCGCUGGCAGCGAUUC | 3699 | GAAUCGCUGCCAGCGCAGC |
| siRNA 64 | 64 | CUGCGCUGGCAGCGAUUCG | 3700 | CGAAUCGCUGCCAGCGCAG |
| siRNA 65 | 65 | UGCGCUGGCAGCGAUUCGC | 3701 | GCGAAUCGCUGCCAGCGCA |
| siRNA 66 | 66 | GCGCUGGCAGCGAUUCGCU | 3702 | AGCGAAUCGCUGCCAGCGC |
| siRNA 67 | 67 | CGCUGGCAGCGAUUCGCUG | 3703 | CAGCGAAUCGCUGCCAGCG |
| siRNA 68 | 68 | GCUGGCAGCGAUUCGCUGU | 3704 | ACAGCGAAUCGCUGCCAGC |
| siRNA 69 | 69 | CUGGCAGCGAUUCGCUGUC | 3705 | GACAGCGAAUCGCUGCCAG |
| siRNA 70 | 70 | UGGCAGCGAUUCGCUGUCU | 3706 | AGACAGCGAAUCGCUGCCA |
| siRNA 71 | 71 | GGCAGCGAUUCGCUGUCUC | 3707 | GAGACAGCGAAUCGCUGCC |
| siRNA 72 | 72 | GCAGCGAUUCGCUGUCUCU | 3708 | AGAGACAGCGAAUCGCUGC |
| siRNA 73 | 73 | CAGCGAUUCGCUGUCUCUU | 3709 | AAGAGACAGCGAAUCGCUG |
| siRNA 74 | 74 | AGCGAUUCGCUGUCUCUUG | 3710 | CAAGAGACAGCGAAUCGCU |
| siRNA 75 | 75 | GCGAUUCGCUGUCUCUUGU | 3711 | ACAAGAGACAGCGAAUCGC |
| siRNA 76 | 76 | CGAUUCGCUGUCUCUUGUG | 3712 | CACAAGAGACAGCGAAUCG |
| siRNA 77 | 77 | GAUUCGCUGUCUCUUGUGA | 3713 | UCACAAGAGACAGCGAAUC |
| siRNA 78 | 78 | AUUCGCUGUCUCUUGUGAG | 3714 | CUCACAAGAGACAGCGAAU |
| siRNA 79 | 79 | UUCGCUGUCUCUUGUGAGU | 3715 | ACUCACAAGAGACAGCGAA |
| siRNA 80 | 80 | UCGCUGUCUCUUGUGAGUC | 3716 | GACUCACAAGAGACAGCGA |
| siRNA 81 | 81 | CGCUGUCUCUUGUGAGUCA | 3717 | UGACUCACAAGAGACAGCG |
| siRNA 82 | 82 | GCUGUCUCUUGUGAGUCAG | 3718 | CUGACUCACAAGAGACAGC |
| siRNA 83 | 83 | CUGUCUCUUGUGAGUCAGG | 3719 | CCUGACUCACAAGAGACAG |
| siRNA 84 | 84 | UGUCUCUUGUGAGUCAGGG | 3720 | CCCUGACUCACAAGAGACA |
| siRNA 85 | 85 | GUCUCUUGUGAGUCAGGGG | 3721 | CCCCUGACUCACAAGAGAC |
| siRNA 86 | 86 | UCUCUUGUGAGUCAGGGGA | 3722 | UCCCCUGACUCACAAGAGA |
| siRNA 87 | 87 | CUCUUGUGAGUCAGGGGAC | 3723 | GUCCCCUGACUCACAAGAG |
| siRNA 88 | 88 | UCUUGUGAGUCAGGGGACA | 3724 | UGUCCCCUGACUCACAAGA |
| siRNA 89 | 89 | CUUGUGAGUCAGGGGACAA | 3725 | UUGUCCCCUGACUCACAAG |
| siRNA 90 | 90 | UUGUGAGUCAGGGGACAAC | 3726 | GUUGUCCCCUGACUCACAA |
| siRNA 91 | 91 | UGUGAGUCAGGGGACAACG | 3727 | CGUUGUCCCCUGACUCACA |
| siRNA 92 | 92 | GUGAGUCAGGGGACAACGC | 3728 | GCGUUGUCCCCUGACUCAC |
| siRNA 93 | 93 | UGAGUCAGGGGACAACGCU | 3729 | AGCGUUGUCCCCUGACUCA |
| siRNA 94 | 94 | GAGUCAGGGGACAACGCUU | 3730 | AAGCGUUGUCCCCUGACUC |
| siRNA 95 | 95 | AGUCAGGGGACAACGCUUC | 3731 | GAAGCGUUGUCCCCUGACU |
| siRNA 96 | 96 | GUCAGGGGACAACGCUUCG | 3732 | CGAAGCGUUGUCCCCUGAC |
| siRNA 97 | 97 | UCAGGGGACAACGCUUCGG | 3733 | CCGAAGCGUUGUCCCCUGA |
| siRNA 98 | 98 | CAGGGGACAACGCUUCGGG | 3734 | CCCGAAGCGUUGUCCCCUG |
| siRNA 99 | 99 | AGGGGACAACGCUUCGGGG | 3735 | CCCCGAAGCGUUGUCCCCU |
| siRNA 100 | 100 | GGGGACAACGCUUCGGGGC | 3736 | GCCCCGAAGCGUUGUCCCC |
| siRNA 101 | 101 | GGGACAACGCUUCGGGGCA | 3737 | UGCCCCGAAGCGUUGUCCC |
| siRNA 102 | 102 | GGACAACGCUUCGGGGCAA | 3738 | UUGCCCCGAAGCGUUGUCC |
| siRNA 103 | 103 | GACAACGCUUCGGGGCAAC | 3739 | GUUGCCCCGAAGCGUUGUC |
| siRNA 104 | 104 | ACAACGCUUCGGGGCAACU | 3740 | AGUUGCCCCGAAGCGUUGU |
| siRNA 105 | 105 | CAACGCUUCGGGGCAACUG | 3741 | CAGUUGCCCCGAAGCGUUG |
| siRNA 106 | 106 | AACGCUUCGGGGCAACUGU | 3742 | ACAGUUGCCCCGAAGCGUU |
| siRNA 107 | 107 | ACGCUUCGGGGCAACUGUG | 3743 | CACAGUUGCCCCGAAGCGU |
| siRNA 108 | 108 | CGCUUCGGGGCAACUGUGA | 3744 | UCACAGUUGCCCCGAAGCG |
| siRNA 109 | 109 | GCUUCGGGGCAACUGUGAG | 3745 | CUCACAGUUGCCCCGAAGC |
| siRNA 110 | 110 | CUUCGGGGCAACUGUGAGU | 3746 | ACUCACAGUUGCCCCGAAG |
| siRNA 111 | 111 | UUCGGGGCAACUGUGAGUG | 3747 | CACUCACAGUUGCCCCGAA |
| siRNA 112 | 112 | UCGGGGCAACUGUGAGUGC | 3748 | GCACUCACAGUUGCCCCGA |
| siRNA 113 | 113 | CGGGGCAACUGUGAGUGCG | 3749 | CGCACUCACAGUUGCCCCG |
| siRNA 114 | 114 | GGGGCAACUGUGAGUGCGC | 3750 | GCGCACUCACAGUUGCCCC |
| siRNA 115 | 115 | GGGCAACUGUGAGUGCGCG | 3751 | CGCGCACUCACAGUUGCCC |
| siRNA 116 | 116 | GGCAACUGUGAGUGCGCGU | 3752 | ACGCGCACUCACAGUUGCC |
| siRNA 117 | 117 | GCAACUGUGAGUGCGCGUG | 3753 | CACGCGCACUCACAGUUGC |
| siRNA 118 | 118 | CAACUGUGAGUGCGCGUGU | 3754 | ACACGCGCACUCACAGUUG |
| siRNA 119 | 119 | AACUGUGAGUGCGCGUGUG | 3755 | CACACGCGCACUCACAGUU |
| siRNA 120 | 120 | ACUGUGAGUGCGCGUGUGG | 3756 | CCACACGCGCACUCACAGU |
| siRNA 121 | 121 | CUGUGAGUGCGCGUGUGGG | 3757 | CCCACACGCGCACUCACAG |
| siRNA 122 | 122 | UGUGAGUGCGCGUGUGGGG | 3758 | CCCCACACGCGCACUCACA |
| siRNA 123 | 123 | GUGAGUGCGCGUGUGGGGG | 3759 | CCCCCACACGCGCACUCAC |
| siRNA 124 | 124 | UGAGUGCGCGUGUGGGGGA | 3760 | UCCCCCACACGCGCACUCA |
| siRNA 125 | 125 | GAGUGCGCGUGUGGGGGAC | 3761 | GUCCCCCACACGCGCACUC |
| siRNA 126 | 126 | AGUGCGCGUGUGGGGGACC | 3762 | GGUCCCCCACACGCGCACU |
| siRNA 127 | 127 | GUGCGCGUGUGGGGGACCU | 3763 | AGGUCCCCCACACGCGCAC |
| siRNA 128 | 128 | UGCGCGUGUGGGGGACCUC | 3764 | GAGGUCCCCCACACGCGCA |
| siRNA 129 | 129 | GCGCGUGUGGGGGACCUCG | 3765 | CGAGGUCCCCCACACGCGC |
| siRNA 130 | 130 | CGCGUGUGGGGGACCUCGA | 3766 | UCGAGGUCCCCCACACGCG |
| siRNA 131 | 131 | GCGUGUGGGGGACCUCGAU | 3767 | AUCGAGGUCCCCCACACGC |
| siRNA 132 | 132 | CGUGUGGGGGACCUCGAUU | 3768 | AAUCGAGGUCCCCCACACG |
| siRNA 133 | 133 | GUGUGGGGGACCUCGAUUC | 3769 | GAAUCGAGGUCCCCCACAC |
| siRNA 134 | 134 | UGUGGGGGACCUCGAUUCU | 3770 | AGAAUCGAGGUCCCCCACA |
| siRNA 135 | 135 | GUGGGGGACCUCGAUUCUC | 3771 | GAGAAUCGAGGUCCCCCAC |
| siRNA 136 | 136 | UGGGGGACCUCGAUUCUCU | 3772 | AGAGAAUCGAGGUCCCCCA |
| siRNA 137 | 137 | GGGGGACCUCGAUUCUCUU | 3773 | AAGAGAAUCGAGGUCCCCC |
| siRNA 138 | 138 | GGGGACCUCGAUUCUCUUC | 3774 | GAAGAGAAUCGAGGUCCCC |
| siRNA 139 | 139 | GGGACCUCGAUUCUCUUCA | 3775 | UGAAGAGAAUCGAGGUCCC |
| siRNA 140 | 140 | GGACCUCGAUUCUCUUCAG | 3776 | CUGAAGAGAAUCGAGGUCC |
| siRNA 141 | 141 | GACCUCGAUUCUCUUCAGA | 3777 | UCUGAAGAGAAUCGAGGUC |
| siRNA 142 | 142 | ACCUCGAUUCUCUUCAGAU | 3778 | AUCUGAAGAGAAUCGAGGU |
| siRNA 143 | 143 | CCUCGAUUCUCUUCAGAUC | 3779 | GAUCUGAAGAGAAUCGAGG |
| siRNA 144 | 144 | CUCGAUUCUCUUCAGAUCU | 3780 | AGAUCUGAAGAGAAUCGAG |
| siRNA 145 | 145 | UCGAUUCUCUUCAGAUCUC | 3781 | GAGAUCUGAAGAGAAUCGA |
| siRNA 146 | 146 | CGAUUCUCUUCAGAUCUCG | 3782 | CGAGAUCUGAAGAGAAUCG |
| siRNA 147 | 147 | GAUUCUCUUCAGAUCUCGA | 3783 | UCGAGAUCUGAAGAGAAUC |
| siRNA 148 | 148 | AUUCUCUUCAGAUCUCGAG | 3784 | CUCGAGAUCUGAAGAGAAU |
| siRNA 149 | 149 | UUCUCUUCAGAUCUCGAGG | 3785 | CCUCGAGAUCUGAAGAGAA |
| siRNA 150 | 150 | UCUCUUCAGAUCUCGAGGA | 3786 | UCCUCGAGAUCUGAAGAGA |
| siRNA 151 | 151 | CUCUUCAGAUCUCGAGGAU | 3787 | AUCCUCGAGAUCUGAAGAG |
| siRNA 152 | 152 | UCUUCAGAUCUCGAGGAUU | 3788 | AAUCCUCGAGAUCUGAAGA |
| siRNA 153 | 153 | CUUCAGAUCUCGAGGAUUC | 3789 | GAAUCCUCGAGAUCUGAAG |
| siRNA 154 | 154 | UUCAGAUCUCGAGGAUUCG | 3790 | CGAAUCCUCGAGAUCUGAA |
| siRNA 155 | 155 | UCAGAUCUCGAGGAUUCGG | 3791 | CCGAAUCCUCGAGAUCUGA |
| siRNA 156 | 156 | CAGAUCUCGAGGAUUCGGU | 3792 | ACCGAAUCCUCGAGAUCUG |
| siRNA 157 | 157 | AGAUCUCGAGGAUUCGGUC | 3793 | GACCGAAUCCUCGAGAUCU |
| siRNA 158 | 158 | GAUCUCGAGGAUUCGGUCC | 3794 | GGACCGAAUCCUCGAGAUC |
| siRNA 159 | 159 | AUCUCGAGGAUUCGGUCCG | 3795 | CGGACCGAAUCCUCGAGAU |
| siRNA 160 | 160 | UCUCGAGGAUUCGGUCCGG | 3796 | CCGGACCGAAUCCUCGAGA |
| siRNA 161 | 161 | CUCGAGGAUUCGGUCCGGG | 3797 | CCCGGACCGAAUCCUCGAG |
| siRNA 162 | 162 | UCGAGGAUUCGGUCCGGGG | 3798 | CCCCGGACCGAAUCCUCGA |
| siRNA 163 | 163 | CGAGGAUUCGGUCCGGGGA | 3799 | UCCCCGGACCGAAUCCUCG |
| siRNA 164 | 164 | GAGGAUUCGGUCCGGGGAC | 3800 | GUCCCCGGACCGAAUCCUC |
| siRNA 165 | 165 | AGGAUUCGGUCCGGGGACG | 3801 | CGUCCCCGGACCGAAUCCU |
| siRNA 166 | 166 | GGAUUCGGUCCGGGGACGU | 3802 | ACGUCCCCGGACCGAAUCC |
| siRNA 167 | 167 | GAUUCGGUCCGGGGACGUC | 3803 | GACGUCCCCGGACCGAAUC |
| siRNA 168 | 168 | AUUCGGUCCGGGGACGUCU | 3804 | AGACGUCCCCGGACCGAAU |
| siRNA 169 | 169 | UUCGGUCCGGGGACGUCUC | 3805 | GAGACGUCCCCGGACCGAA |
| siRNA 170 | 170 | UCGGUCCGGGGACGUCUCC | 3806 | GGAGACGUCCCCGGACCGA |
| siRNA 171 | 171 | CGGUCCGGGGACGUCUCCU | 3807 | AGGAGACGUCCCCGGACCG |
| siRNA 172 | 172 | GGUCCGGGGACGUCUCCUG | 3808 | CAGGAGACGUCCCCGGACC |
| siRNA 173 | 173 | GUCCGGGGACGUCUCCUGA | 3809 | UCAGGAGACGUCCCCGGAC |
| siRNA 174 | 174 | UCCGGGGACGUCUCCUGAU | 3810 | AUCAGGAGACGUCCCCGGA |
| siRNA 175 | 175 | CCGGGGACGUCUCCUGAUC | 3811 | GAUCAGGAGACGUCCCCGG |
| siRNA 176 | 176 | CGGGGACGUCUCCUGAUCC | 3812 | GGAUCAGGAGACGUCCCCG |
| siRNA 177 | 177 | GGGGACGUCUCCUGAUCCC | 3813 | GGGAUCAGGAGACGUCCCC |
| siRNA 178 | 178 | GGGACGUCUCCUGAUCCCC | 3814 | GGGGAUCAGGAGACGUCCC |
| siRNA 179 | 179 | GGACGUCUCCUGAUCCCCU | 3815 | AGGGGAUCAGGAGACGUCC |
| siRNA 180 | 180 | GACGUCUCCUGAUCCCCUA | 3816 | UAGGGGAUCAGGAGACGUC |
| siRNA 181 | 181 | ACGUCUCCUGAUCCCCUAC | 3817 | GUAGGGGAUCAGGAGACGU |
| siRNA 182 | 182 | CGUCUCCUGAUCCCCUACU | 3818 | AGUAGGGGAUCAGGAGACG |
| siRNA 183 | 183 | GUCUCCUGAUCCCCUACUA | 3819 | UAGUAGGGGAUCAGGAGAC |
| siRNA 184 | 184 | UCUCCUGAUCCCCUACUAA | 3820 | UUAGUAGGGGAUCAGGAGA |
| siRNA 185 | 185 | CUCCUGAUCCCCUACUAAA | 3821 | UUUAGUAGGGGAUCAGGAG |
| siRNA 186 | 186 | UCCUGAUCCCCUACUAAAG | 3822 | CUUUAGUAGGGGAUCAGGA |
| siRNA 187 | 187 | CCUGAUCCCCUACUAAAGC | 3823 | GCUUUAGUAGGGGAUCAGG |
| siRNA 188 | 188 | CUGAUCCCCUACUAAAGCG | 3824 | CGCUUUAGUAGGGGAUCAG |
| siRNA 189 | 189 | UGAUCCCCUACUAAAGCGC | 3825 | GCGCUUUAGUAGGGGAUCA |
| siRNA 190 | 190 | GAUCCCCUACUAAAGCGCC | 3826 | GGCGCUUUAGUAGGGGAUC |
| siRNA 191 | 191 | AUCCCCUACUAAAGCGCCU | 3827 | AGGCGCUUUAGUAGGGGAU |
| siRNA 192 | 192 | UCCCCUACUAAAGCGCCUG | 3828 | CAGGCGCUUUAGUAGGGGA |
| siRNA 193 | 193 | CCCCUACUAAAGCGCCUGC | 3829 | GCAGGCGCUUUAGUAGGGG |
| siRNA 194 | 194 | CCCUACUAAAGCGCCUGCU | 3830 | AGCAGGCGCUUUAGUAGGG |
| siRNA 195 | 195 | CCUACUAAAGCGCCUGCUA | 3831 | UAGCAGGCGCUUUAGUAGG |
| siRNA 196 | 196 | CUACUAAAGCGCCUGCUAA | 3832 | UUAGCAGGCGCUUUAGUAG |
| siRNA 197 | 197 | UACUAAAGCGCCUGCUAAC | 3833 | GUUAGCAGGCGCUUUAGUA |
| siRNA 198 | 198 | ACUAAAGCGCCUGCUAACU | 3834 | AGUUAGCAGGCGCUUUAGU |
| siRNA 199 | 199 | CUAAAGCGCCUGCUAACUU | 3835 | AAGUUAGCAGGCGCUUUAG |
| siRNA 200 | 200 | UAAAGCGCCUGCUAACUUU | 3836 | AAAGUUAGCAGGCGCUUUA |
| siRNA 201 | 201 | AAAGCGCCUGCUAACUUUG | 3837 | CAAAGUUAGCAGGCGCUUU |
| siRNA 202 | 202 | AAGCGCCUGCUAACUUUGA | 3838 | UCAAAGUUAGCAGGCGCUU |
| siRNA 203 | 203 | AGCGCCUGCUAACUUUGAA | 3839 | UUCAAAGUUAGCAGGCGCU |
| siRNA 204 | 204 | GCGCCUGCUAACUUUGAAA | 3840 | UUUCAAAGUUAGCAGGCGC |
| siRNA 205 | 205 | CGCCUGCUAACUUUGAAAA | 3841 | UUUUCAAAGUUAGCAGGCG |
| siRNA 206 | 206 | GCCUGCUAACUUUGAAAAG | 3842 | CUUUUCAAAGUUAGCAGGC |
| siRNA 207 | 207 | CCUGCUAACUUUGAAAAGG | 3843 | CCUUUUCAAAGUUAGCAGG |
| siRNA 208 | 208 | CUGCUAACUUUGAAAAGGA | 3844 | UCCUUUUCAAAGUUAGCAG |
| siRNA 209 | 209 | UGCUAACUUUGAAAAGGAG | 3845 | CUCCUUUUCAAAGUUAGCA |
| siRNA 210 | 210 | GCUAACUUUGAAAAGGAGC | 3846 | GCUCCUUUUCAAAGUUAGC |
| siRNA 211 | 211 | CUAACUUUGAAAAGGAGCA | 3847 | UGCUCCUUUUCAAAGUUAG |
| siRNA 212 | 212 | UAACUUUGAAAAGGAGCAC | 3848 | GUGCUCCUUUUCAAAGUUA |
| siRNA 213 | 213 | AACUUUGAAAAGGAGCACU | 3849 | AGUGCUCCUUUUCAAAGUU |
| siRNA 214 | 214 | ACUUUGAAAAGGAGCACUG | 3850 | CAGUGCUCCUUUUCAAAGU |
| siRNA 215 | 215 | CUUUGAAAAGGAGCACUGU | 3851 | ACAGUGCUCCUUUUCAAAG |
| siRNA 216 | 216 | UUUGAAAAGGAGCACUGUG | 3852 | CACAGUGCUCCUUUUCAAA |
| siRNA 217 | 217 | UUGAAAAGGAGCACUGUGU | 3853 | ACACAGUGCUCCUUUUCAA |
| siRNA 218 | 218 | UGAAAAGGAGCACUGUGUC | 3854 | GACACAGUGCUCCUUUUCA |
| siRNA 219 | 219 | GAAAAGGAGCACUGUGUCC | 3855 | GGACACAGUGCUCCUUUUC |
| siRNA 220 | 220 | AAAAGGAGCACUGUGUCCU | 3856 | AGGACACAGUGCUCCUUUU |
| siRNA 221 | 221 | AAAGGAGCACUGUGUCCUG | 3857 | CAGGACACAGUGCUCCUUU |
| siRNA 222 | 222 | AAGGAGCACUGUGUCCUGC | 3858 | GCAGGACACAGUGCUCCUU |
| siRNA 223 | 223 | AGGAGCACUGUGUCCUGCA | 3859 | UGCAGGACACAGUGCUCCU |
| siRNA 224 | 224 | GGAGCACUGUGUCCUGCAA | 3860 | UUGCAGGACACAGUGCUCC |
| siRNA 225 | 225 | GAGCACUGUGUCCUGCAAA | 3861 | UUUGCAGGACACAGUGCUC |
| siRNA 226 | 226 | AGCACUGUGUCCUGCAAAG | 3862 | CUUUGCAGGACACAGUGCU |
| siRNA 227 | 227 | GCACUGUGUCCUGCAAAGU | 3863 | ACUUUGCAGGACACAGUGC |
| siRNA 228 | 228 | CACUGUGUCCUGCAAAGUU | 3864 | AACUUUGCAGGACACAGUG |
| siRNA 229 | 229 | ACUGUGUCCUGCAAAGUUU | 3865 | AAACUUUGCAGGACACAGU |
| siRNA 230 | 230 | CUGUGUCCUGCAAAGUUUG | 3866 | CAAACUUUGCAGGACACAG |
| siRNA 231 | 231 | UGUGUCCUGCAAAGUUUGA | 3867 | UCAAACUUUGCAGGACACA |
| siRNA 232 | 232 | GUGUCCUGCAAAGUUUGAC | 3868 | GUCAAACUUUGCAGGACAC |
| siRNA 233 | 233 | UGUCCUGCAAAGUUUGACA | 3869 | UGUCAAACUUUGCAGGACA |
| siRNA 234 | 234 | GUCCUGCAAAGUUUGACAC | 3870 | GUGUCAAACUUUGCAGGAC |
| siRNA 235 | 235 | UCCUGCAAAGUUUGACACA | 3871 | UGUGUCAAACUUUGCAGGA |
| siRNA 236 | 236 | CCUGCAAAGUUUGACACAU | 3872 | AUGUGUCAAACUUUGCAGG |
| siRNA 237 | 237 | CUGCAAAGUUUGACACAUA | 3873 | UAUGUGUCAAACUUUGCAG |
| siRNA 238 | 238 | UGCAAAGUUUGACACAUAA | 3874 | UUAUGUGUCAAACUUUGCA |
| siRNA 239 | 239 | GCAAAGUUUGACACAUAAA | 3875 | UUUAUGUGUCAAACUUUGC |
| siRNA 240 | 240 | CAAAGUUUGACACAUAAAG | 3876 | CUUUAUGUGUCAAACUUUG |
| siRNA 241 | 241 | AAAGUUUGACACAUAAAGG | 3877 | CCUUUAUGUGUCAAACUUU |
| siRNA 242 | 242 | AAGUUUGACACAUAAAGGA | 3878 | UCCUUUAUGUGUCAAACUU |
| siRNA 243 | 243 | AGUUUGACACAUAAAGGAU | 3879 | AUCCUUUAUGUGUCAAACU |
| siRNA 244 | 244 | GUUUGACACAUAAAGGAUA | 3880 | UAUCCUUUAUGUGUCAAAC |
| siRNA 245 | 245 | UUUGACACAUAAAGGAUAG | 3881 | CUAUCCUUUAUGUGUCAAA |
| siRNA 246 | 246 | UUGACACAUAAAGGAUAGG | 3882 | CCUAUCCUUUAUGUGUCAA |
| siRNA 247 | 247 | UGACACAUAAAGGAUAGGA | 3883 | UCCUAUCCUUUAUGUGUCA |
| siRNA 248 | 248 | GACACAUAAAGGAUAGGAA | 3884 | UUCCUAUCCUUUAUGUGUC |
| siRNA 249 | 249 | ACACAUAAAGGAUAGGAAA | 3885 | UUUCCUAUCCUUUAUGUGU |
| siRNA 250 | 250 | CACAUAAAGGAUAGGAAAA | 3886 | UUUUCCUAUCCUUUAUGUG |
| siRNA 251 | 251 | ACAUAAAGGAUAGGAAAAG | 3887 | CUUUUCCUAUCCUUUAUGU |
| siRNA 252 | 252 | CAUAAAGGAUAGGAAAAGA | 3888 | UCUUUUCCUAUCCUUUAUG |
| siRNA 253 | 253 | AUAAAGGAUAGGAAAAGAG | 3889 | CUCUUUUCCUAUCCUUUAU |
| siRNA 254 | 254 | UAAAGGAUAGGAAAAGAGA | 3890 | UCUCUUUUCCUAUCCUUUA |
| siRNA 255 | 255 | AAAGGAUAGGAAAAGAGAG | 3891 | CUCUCUUUUCCUAUCCUUU |
| siRNA 256 | 256 | AAGGAUAGGAAAAGAGAGG | 3892 | CCUCUCUUUUCCUAUCCUU |
| siRNA 257 | 257 | AGGAUAGGAAAAGAGAGGA | 3893 | UCCUCUCUUUUCCUAUCCU |
| siRNA 258 | 258 | GGAUAGGAAAAGAGAGGAG | 3894 | CUCCUCUCUUUUCCUAUCC |
| siRNA 259 | 259 | GAUAGGAAAAGAGAGGAGA | 3895 | UCUCCUCUCUUUUCCUAUC |
| siRNA 260 | 260 | AUAGGAAAAGAGAGGAGAG | 3896 | CUCUCCUCUCUUUUCCUAU |
| siRNA 261 | 261 | UAGGAAAAGAGAGGAGAGA | 3897 | UCUCUCCUCUCUUUUCCUA |
| siRNA 262 | 262 | AGGAAAAGAGAGGAGAGAA | 3898 | UUCUCUCCUCUCUUUUCCU |
| siRNA 263 | 263 | GGAAAAGAGAGGAGAGAAA | 3899 | UUUCUCUCCUCUCUUUUCC |
| siRNA 264 | 264 | GAAAAGAGAGGAGAGAAAA | 3900 | UUUUCUCUCCUCUCUUUUC |
| siRNA 265 | 265 | AAAAGAGAGGAGAGAAAAG | 3901 | CUUUUCUCUCCUCUCUUUU |
| siRNA 266 | 266 | AAAGAGAGGAGAGAAAAGC | 3902 | GCUUUUCUCUCCUCUCUUU |
| siRNA 267 | 267 | AAGAGAGGAGAGAAAAGCA | 3903 | UGCUUUUCUCUCCUCUCUU |
| siRNA 268 | 268 | AGAGAGGAGAGAAAAGCAA | 3904 | UUGCUUUUCUCUCCUCUCU |
| siRNA 269 | 269 | GAGAGGAGAGAAAAGCAAC | 3905 | GUUGCUUUUCUCUCCUCUC |
| siRNA 270 | 270 | AGAGGAGAGAAAAGCAACU | 3906 | AGUUGCUUUUCUCUCCUCU |
| siRNA 271 | 271 | GAGGAGAGAAAAGCAACUG | 3907 | CAGUUGCUUUUCUCUCCUC |
| siRNA 272 | 272 | AGGAGAGAAAAGCAACUGA | 3908 | UCAGUUGCUUUUCUCUCCU |
| siRNA 273 | 273 | GGAGAGAAAAGCAACUGAG | 3909 | CUCAGUUGCUUUUCUCUCC |
| siRNA 274 | 274 | GAGAGAAAAGCAACUGAGU | 3910 | ACUCAGUUGCUUUUCUCUC |
| siRNA 275 | 275 | AGAGAAAAGCAACUGAGUU | 3911 | AACUCAGUUGCUUUUCUCU |
| siRNA 276 | 276 | GAGAAAAGCAACUGAGUUG | 3912 | CAACUCAGUUGCUUUUCUC |
| siRNA 277 | 277 | AGAAAAGCAACUGAGUUGA | 3913 | UCAACUCAGUUGCUUUUCU |
| siRNA 278 | 278 | GAAAAGCAACUGAGUUGAA | 3914 | UUCAACUCAGUUGCUUUUC |
| siRNA 279 | 279 | AAAAGCAACUGAGUUGAAG | 3915 | CUUCAACUCAGUUGCUUUU |
| siRNA 280 | 280 | AAAGCAACUGAGUUGAAGG | 3916 | CCUUCAACUCAGUUGCUUU |
| siRNA 281 | 281 | AAGCAACUGAGUUGAAGGA | 3917 | UCCUUCAACUCAGUUGCUU |
| siRNA 282 | 282 | AGCAACUGAGUUGAAGGAG | 3918 | CUCCUUCAACUCAGUUGCU |
| siRNA 283 | 283 | GCAACUGAGUUGAAGGAGA | 3919 | UCUCCUUCAACUCAGUUGC |
| siRNA 284 | 284 | CAACUGAGUUGAAGGAGAA | 3920 | UUCUCCUUCAACUCAGUUG |
| siRNA 285 | 285 | AACUGAGUUGAAGGAGAAG | 3921 | CUUCUCCUUCAACUCAGUU |
| siRNA 286 | 286 | ACUGAGUUGAAGGAGAAGG | 3922 | CCUUCUCCUUCAACUCAGU |
| siRNA 287 | 287 | CUGAGUUGAAGGAGAAGGA | 3923 | UCCUUCUCCUUCAACUCAG |
| siRNA 288 | 288 | UGAGUUGAAGGAGAAGGAG | 3924 | CUCCUUCUCCUUCAACUCA |
| siRNA 289 | 289 | GAGUUGAAGGAGAAGGAGC | 3925 | GCUCCUUCUCCUUCAACUC |
| siRNA 290 | 290 | AGUUGAAGGAGAAGGAGCU | 3926 | AGCUCCUUCUCCUUCAACU |
| siRNA 291 | 291 | GUUGAAGGAGAAGGAGCUG | 3927 | CAGCUCCUUCUCCUUCAAC |
| siRNA 292 | 292 | UUGAAGGAGAAGGAGCUGA | 3928 | UCAGCUCCUUCUCCUUCAA |
| siRNA 293 | 293 | UGAAGGAGAAGGAGCUGAU | 3929 | AUCAGCUCCUUCUCCUUCA |
| siRNA 294 | 294 | GAAGGAGAAGGAGCUGAUG | 3930 | CAUCAGCUCCUUCUCCUUC |
| siRNA 295 | 295 | AAGGAGAAGGAGCUGAUGC | 3931 | GCAUCAGCUCCUUCUCCUU |
| siRNA 296 | 296 | AGGAGAAGGAGCUGAUGCG | 3932 | CGCAUCAGCUCCUUCUCCU |
| siRNA 297 | 297 | GGAGAAGGAGCUGAUGCGG | 3933 | CCGCAUCAGCUCCUUCUCC |
| siRNA 298 | 298 | GAGAAGGAGCUGAUGCGGG | 3934 | CCCGCAUCAGCUCCUUCUC |
| siRNA 299 | 299 | AGAAGGAGCUGAUGCGGGC | 3935 | GCCCGCAUCAGCUCCUUCU |
| siRNA 300 | 300 | GAAGGAGCUGAUGCGGGCC | 3936 | GGCCCGCAUCAGCUCCUUC |
| siRNA 301 | 301 | AAGGAGCUGAUGCGGGCCU | 3937 | AGGCCCGCAUCAGCUCCUU |
| siRNA 302 | 302 | AGGAGCUGAUGCGGGCCUC | 3938 | GAGGCCCGCAUCAGCUCCU |
| siRNA 303 | 303 | GGAGCUGAUGCGGGCCUCC | 3939 | GGAGGCCCGCAUCAGCUCC |
| siRNA 304 | 304 | GAGCUGAUGCGGGCCUCCU | 3940 | AGGAGGCCCGCAUCAGCUC |
| siRNA 305 | 305 | AGCUGAUGCGGGCCUCCUG | 3941 | CAGGAGGCCCGCAUCAGCU |
| siRNA 306 | 306 | GCUGAUGCGGGCCUCCUGA | 3942 | UCAGGAGGCCCGCAUCAGC |
| siRNA 307 | 307 | CUGAUGCGGGCCUCCUGAU | 3943 | AUCAGGAGGCCCGCAUCAG |
| siRNA 308 | 308 | UGAUGCGGGCCUCCUGAUC | 3944 | GAUCAGGAGGCCCGCAUCA |
| siRNA 309 | 309 | GAUGCGGGCCUCCUGAUCA | 3945 | UGAUCAGGAGGCCCGCAUC |
| siRNA 310 | 310 | AUGCGGGCCUCCUGAUCAA | 3946 | UUGAUCAGGAGGCCCGCAU |
| siRNA 311 | 311 | UGCGGGCCUCCUGAUCAAU | 3947 | AUUGAUCAGGAGGCCCGCA |
| siRNA 312 | 312 | GCGGGCCUCCUGAUCAAUU | 3948 | AAUUGAUCAGGAGGCCCGC |
| siRNA 313 | 313 | CGGGCCUCCUGAUCAAUUA | 3949 | UAAUUGAUCAGGAGGCCCG |
| siRNA 314 | 314 | GGGCCUCCUGAUCAAUUAA | 3950 | UUAAUUGAUCAGGAGGCCC |
| siRNA 315 | 315 | GGCCUCCUGAUCAAUUAAG | 3951 | CUUAAUUGAUCAGGAGGCC |
| siRNA 316 | 316 | GCCUCCUGAUCAAUUAAGA | 3952 | UCUUAAUUGAUCAGGAGGC |
| siRNA 317 | 317 | CCUCCUGAUCAAUUAAGAG | 3953 | CUCUUAAUUGAUCAGGAGG |
| siRNA 318 | 318 | CUCCUGAUCAAUUAAGAGG | 3954 | CCUCUUAAUUGAUCAGGAG |
| siRNA 319 | 319 | UCCUGAUCAAUUAAGAGGA | 3955 | UCCUCUUAAUUGAUCAGGA |
| siRNA 320 | 320 | CCUGAUCAAUUAAGAGGAG | 3956 | CUCCUCUUAAUUGAUCAGG |
| siRNA 321 | 321 | CUGAUCAAUUAAGAGGAGA | 3957 | UCUCCUCUUAAUUGAUCAG |
| siRNA 322 | 322 | UGAUCAAUUAAGAGGAGAG | 3958 | CUCUCCUCUUAAUUGAUCA |
| siRNA 323 | 323 | GAUCAAUUAAGAGGAGAGU | 3959 | ACUCUCCUCUUAAUUGAUC |
| siRNA 324 | 324 | AUCAAUUAAGAGGAGAGUU | 3960 | AACUCUCCUCUUAAUUGAU |
| siRNA 325 | 325 | UCAAUUAAGAGGAGAGUUA | 3961 | UAACUCUCCUCUUAAUUGA |
| siRNA 326 | 326 | CAAUUAAGAGGAGAGUUAA | 3962 | UUAACUCUCCUCUUAAUUG |
| siRNA 327 | 327 | AAUUAAGAGGAGAGUUAAA | 3963 | UUUAACUCUCCUCUUAAUU |
| siRNA 328 | 328 | AUUAAGAGGAGAGUUAAAC | 3964 | GUUUAACUCUCCUCUUAAU |
| siRNA 329 | 329 | UUAAGAGGAGAGUUAAACC | 3965 | GGUUUAACUCUCCUCUUAA |
| siRNA 330 | 330 | UAAGAGGAGAGUUAAACCG | 3966 | CGGUUUAACUCUCCUCUUA |
| siRNA 331 | 331 | AAGAGGAGAGUUAAACCGC | 3967 | GCGGUUUAACUCUCCUCUU |
| siRNA 332 | 332 | AGAGGAGAGUUAAACCGCC | 3968 | GGCGGUUUAACUCUCCUCU |
| siRNA 333 | 333 | GAGGAGAGUUAAACCGCCG | 3969 | CGGCGGUUUAACUCUCCUC |
| siRNA 334 | 334 | AGGAGAGUUAAACCGCCGA | 3970 | UCGGCGGUUUAACUCUCCU |
| siRNA 335 | 335 | GGAGAGUUAAACCGCCGAG | 3971 | CUCGGCGGUUUAACUCUCC |
| siRNA 336 | 336 | GAGAGUUAAACCGCCGAGA | 3972 | UCUCGGCGGUUUAACUCUC |
| siRNA 337 | 337 | AGAGUUAAACCGCCGAGAU | 3973 | AUCUCGGCGGUUUAACUCU |
| siRNA 338 | 338 | GAGUUAAACCGCCGAGAUC | 3974 | GAUCUCGGCGGUUUAACUC |
| siRNA 339 | 339 | AGUUAAACCGCCGAGAUCC | 3975 | GGAUCUCGGCGGUUUAACU |
| siRNA 340 | 340 | GUUAAACCGCCGAGAUCCC | 3976 | GGGAUCUCGGCGGUUUAAC |
| siRNA 341 | 341 | UUAAACCGCCGAGAUCCCG | 3977 | CGGGAUCUCGGCGGUUUAA |
| siRNA 342 | 342 | UAAACCGCCGAGAUCCCGG | 3978 | CCGGGAUCUCGGCGGUUUA |
| siRNA 343 | 343 | AAACCGCCGAGAUCCCGGC | 3979 | GCCGGGAUCUCGGCGGUUU |
| siRNA 344 | 344 | AACCGCCGAGAUCCCGGCG | 3980 | CGCCGGGAUCUCGGCGGUU |
| siRNA 345 | 345 | ACCGCCGAGAUCCCGGCGG | 3981 | CCGCCGGGAUCUCGGCGGU |
| siRNA 346 | 346 | CCGCCGAGAUCCCGGCGGG | 3982 | CCCGCCGGGAUCUCGGCGG |
| siRNA 347 | 347 | CGCCGAGAUCCCGGCGGGA | 3983 | UCCCGCCGGGAUCUCGGCG |
| siRNA 348 | 348 | GCCGAGAUCCCGGCGGGAC | 3984 | GUCCCGCCGGGAUCUCGGC |
| siRNA 349 | 349 | CCGAGAUCCCGGCGGGACC | 3985 | GGUCCCGCCGGGAUCUCGG |
| siRNA 350 | 350 | CGAGAUCCCGGCGGGACCA | 3986 | UGGUCCCGCCGGGAUCUCG |
| siRNA 351 | 351 | GAGAUCCCGGCGGGACCAA | 3987 | UUGGUCCCGCCGGGAUCUC |
| siRNA 352 | 352 | AGAUCCCGGCGGGACCAAG | 3988 | CUUGGUCCCGCCGGGAUCU |
| siRNA 353 | 353 | GAUCCCGGCGGGACCAAGG | 3989 | CCUUGGUCCCGCCGGGAUC |
| siRNA 354 | 354 | AUCCCGGCGGGACCAAGGA | 3990 | UCCUUGGUCCCGCCGGGAU |
| siRNA 355 | 355 | UCCCGGCGGGACCAAGGAG | 3991 | CUCCUUGGUCCCGCCGGGA |
| siRNA 356 | 356 | CCCGGCGGGACCAAGGAGG | 3992 | CCUCCUUGGUCCCGCCGGG |
| siRNA 357 | 357 | CCGGCGGGACCAAGGAGGU | 3993 | ACCUCCUUGGUCCCGCCGG |
| siRNA 358 | 358 | CGGCGGGACCAAGGAGGUG | 3994 | CACCUCCUUGGUCCCGCCG |
| siRNA 359 | 359 | GGCGGGACCAAGGAGGUGC | 3995 | GCACCUCCUUGGUCCCGCC |
| siRNA 360 | 360 | GCGGGACCAAGGAGGUGCG | 3996 | CGCACCUCCUUGGUCCCGC |
| siRNA 361 | 361 | CGGGACCAAGGAGGUGCGG | 3997 | CCGCACCUCCUUGGUCCCG |
| siRNA 362 | 362 | GGGACCAAGGAGGUGCGGG | 3998 | CCCGCACCUCCUUGGUCCC |
| siRNA 363 | 363 | GGACCAAGGAGGUGCGGGG | 3999 | CCCCGCACCUCCUUGGUCC |
| siRNA 364 | 364 | GACCAAGGAGGUGCGGGGC | 4000 | GCCCCGCACCUCCUUGGUC |
| siRNA 365 | 365 | ACCAAGGAGGUGCGGGGCA | 4001 | UGCCCCGCACCUCCUUGGU |
| siRNA 366 | 366 | CCAAGGAGGUGCGGGGCAA | 4002 | UUGCCCCGCACCUCCUUGG |
| siRNA 367 | 367 | CAAGGAGGUGCGGGGCAAG | 4003 | CUUGCCCCGCACCUCCUUG |
| siRNA 368 | 368 | AAGGAGGUGCGGGGCAAGA | 4004 | UCUUGCCCCGCACCUCCUU |
| siRNA 369 | 369 | AGGAGGUGCGGGGCAAGAA | 4005 | UUCUUGCCCCGCACCUCCU |
| siRNA 370 | 370 | GGAGGUGCGGGGCAAGAAG | 4006 | CUUCUUGCCCCGCACCUCC |
| siRNA 371 | 371 | GAGGUGCGGGGCAAGAAGG | 4007 | CCUUCUUGCCCCGCACCUC |
| siRNA 372 | 372 | AGGUGCGGGGCAAGAAGGA | 4008 | UCCUUCUUGCCCCGCACCU |
| siRNA 373 | 373 | GGUGCGGGGCAAGAAGGAA | 4009 | UUCCUUCUUGCCCCGCACC |
| siRNA 374 | 374 | GUGCGGGGCAAGAAGGAAC | 4010 | GUUCCUUCUUGCCCCGCAC |
| siRNA 375 | 375 | UGCGGGGCAAGAAGGAACG | 4011 | CGUUCCUUCUUGCCCCGCA |
| siRNA 376 | 376 | GCGGGGCAAGAAGGAACGG | 4012 | CCGUUCCUUCUUGCCCCGC |
| siRNA 377 | 377 | CGGGGCAAGAAGGAACGGA | 4013 | UCCGUUCCUUCUUGCCCCG |
| siRNA 378 | 378 | GGGGCAAGAAGGAACGGAA | 4014 | UUCCGUUCCUUCUUGCCCC |
| siRNA 379 | 379 | GGGCAAGAAGGAACGGAAG | 4015 | CUUCCGUUCCUUCUUGCCC |
| siRNA 380 | 380 | GGCAAGAAGGAACGGAAGC | 4016 | GCUUCCGUUCCUUCUUGCC |
| siRNA 381 | 381 | GCAAGAAGGAACGGAAGCG | 4017 | CGCUUCCGUUCCUUCUUGC |
| siRNA 382 | 382 | CAAGAAGGAACGGAAGCGG | 4018 | CCGCUUCCGUUCCUUCUUG |
| siRNA 383 | 383 | AAGAAGGAACGGAAGCGGU | 4019 | ACCGCUUCCGUUCCUUCUU |
| siRNA 384 | 384 | AGAAGGAACGGAAGCGGUG | 4020 | CACCGCUUCCGUUCCUUCU |
| siRNA 385 | 385 | GAAGGAACGGAAGCGGUGC | 4021 | GCACCGCUUCCGUUCCUUC |
| siRNA 386 | 386 | AAGGAACGGAAGCGGUGCG | 4022 | CGCACCGCUUCCGUUCCUU |
| siRNA 387 | 387 | AGGAACGGAAGCGGUGCGA | 4023 | UCGCACCGCUUCCGUUCCU |
| siRNA 388 | 388 | GGAACGGAAGCGGUGCGAU | 4024 | AUCGCACCGCUUCCGUUCC |
| siRNA 389 | 389 | GAACGGAAGCGGUGCGAUC | 4025 | GAUCGCACCGCUUCCGUUC |
| siRNA 390 | 390 | AACGGAAGCGGUGCGAUCC | 4026 | GGAUCGCACCGCUUCCGUU |
| siRNA 391 | 391 | ACGGAAGCGGUGCGAUCCA | 4027 | UGGAUCGCACCGCUUCCGU |
| siRNA 392 | 392 | CGGAAGCGGUGCGAUCCAC | 4028 | GUGGAUCGCACCGCUUCCG |
| siRNA 393 | 393 | GGAAGCGGUGCGAUCCACA | 4029 | UGUGGAUCGCACCGCUUCC |
| siRNA 394 | 394 | GAAGCGGUGCGAUCCACAG | 4030 | CUGUGGAUCGCACCGCUUC |
| siRNA 395 | 395 | AAGCGGUGCGAUCCACAGG | 4031 | CCUGUGGAUCGCACCGCUU |
| siRNA 396 | 396 | AGCGGUGCGAUCCACAGGG | 4032 | CCCUGUGGAUCGCACCGCU |
| siRNA 397 | 397 | GCGGUGCGAUCCACAGGGC | 4033 | GCCCUGUGGAUCGCACCGC |
| siRNA 398 | 398 | CGGUGCGAUCCACAGGGCU | 4034 | AGCCCUGUGGAUCGCACCG |
| siRNA 399 | 399 | GGUGCGAUCCACAGGGCUG | 4035 | CAGCCCUGUGGAUCGCACC |
| siRNA 400 | 400 | GUGCGAUCCACAGGGCUGG | 4036 | CCAGCCCUGUGGAUCGCAC |
| siRNA 401 | 401 | UGCGAUCCACAGGGCUGGG | 4037 | CCCAGCCCUGUGGAUCGCA |
| siRNA 402 | 402 | GCGAUCCACAGGGCUGGGU | 4038 | ACCCAGCCCUGUGGAUCGC |
| siRNA 403 | 403 | CGAUCCACAGGGCUGGGUU | 4039 | AACCCAGCCCUGUGGAUCG |
| siRNA 404 | 404 | GAUCCACAGGGCUGGGUUU | 4040 | AAACCCAGCCCUGUGGAUC |
| siRNA 405 | 405 | AUCCACAGGGCUGGGUUUU | 4041 | AAAACCCAGCCCUGUGGAU |
| siRNA 406 | 406 | UCCACAGGGCUGGGUUUUC | 4042 | GAAAACCCAGCCCUGUGGA |
| siRNA 407 | 407 | CCACAGGGCUGGGUUUUCU | 4043 | AGAAAACCCAGCCCUGUGG |
| siRNA 408 | 408 | CACAGGGCUGGGUUUUCUU | 4044 | AAGAAAACCCAGCCCUGUG |
| siRNA 409 | 409 | ACAGGGCUGGGUUUUCUUG | 4045 | CAAGAAAACCCAGCCCUGU |
| siRNA 410 | 410 | CAGGGCUGGGUUUUCUUGC | 4046 | GCAAGAAAACCCAGCCCUG |
| siRNA 411 | 411 | AGGGCUGGGUUUUCUUGCA | 4047 | UGCAAGAAAACCCAGCCCU |
| siRNA 412 | 412 | GGGCUGGGUUUUCUUGCAC | 4048 | GUGCAAGAAAACCCAGCCC |
| siRNA 413 | 413 | GGCUGGGUUUUCUUGCACC | 4049 | GGUGCAAGAAAACCCAGCC |
| siRNA 414 | 414 | GCUGGGUUUUCUUGCACCU | 4050 | AGGUGCAAGAAAACCCAGC |
| siRNA 415 | 415 | CUGGGUUUUCUUGCACCUU | 4051 | AAGGUGCAAGAAAACCCAG |
| siRNA 416 | 416 | UGGGUUUUCUUGCACCUUG | 4052 | CAAGGUGCAAGAAAACCCA |
| siRNA 417 | 417 | GGGUUUUCUUGCACCUUGG | 4053 | CCAAGGUGCAAGAAAACCC |
| siRNA 418 | 418 | GGUUUUCUUGCACCUUGGG | 4054 | CCCAAGGUGCAAGAAAACC |
| siRNA 419 | 419 | GUUUUCUUGCACCUUGGGU | 4055 | ACCCAAGGUGCAAGAAAAC |
| siRNA 420 | 420 | UUUUCUUGCACCUUGGGUC | 4056 | GACCCAAGGUGCAAGAAAA |
| siRNA 421 | 421 | UUUCUUGCACCUUGGGUCA | 4057 | UGACCCAAGGUGCAAGAAA |
| siRNA 422 | 422 | UUCUUGCACCUUGGGUCAC | 4058 | GUGACCCAAGGUGCAAGAA |
| siRNA 423 | 423 | UCUUGCACCUUGGGUCACG | 4059 | CGUGACCCAAGGUGCAAGA |
| siRNA 424 | 424 | CUUGCACCUUGGGUCACGC | 4060 | GCGUGACCCAAGGUGCAAG |
| siRNA 425 | 425 | UUGCACCUUGGGUCACGCC | 4061 | GGCGUGACCCAAGGUGCAA |
| siRNA 426 | 426 | UGCACCUUGGGUCACGCCU | 4062 | AGGCGUGACCCAAGGUGCA |
| siRNA 427 | 427 | GCACCUUGGGUCACGCCUC | 4063 | GAGGCGUGACCCAAGGUGC |
| siRNA 428 | 428 | CACCUUGGGUCACGCCUCC | 4064 | GGAGGCGUGACCCAAGGUG |
| siRNA 429 | 429 | ACCUUGGGUCACGCCUCCU | 4065 | AGGAGGCGUGACCCAAGGU |
| siRNA 430 | 430 | CCUUGGGUCACGCCUCCUU | 4066 | AAGGAGGCGUGACCCAAGG |
| siRNA 431 | 431 | CUUGGGUCACGCCUCCUUG | 4067 | CAAGGAGGCGUGACCCAAG |
| siRNA 432 | 432 | UUGGGUCACGCCUCCUUGG | 4068 | CCAAGGAGGCGUGACCCAA |
| siRNA 433 | 433 | UGGGUCACGCCUCCUUGGC | 4069 | GCCAAGGAGGCGUGACCCA |
| siRNA 434 | 434 | GGGUCACGCCUCCUUGGCG | 4070 | CGCCAAGGAGGCGUGACCC |
| siRNA 435 | 435 | GGUCACGCCUCCUUGGCGA | 4071 | UCGCCAAGGAGGCGUGACC |
| siRNA 436 | 436 | GUCACGCCUCCUUGGCGAG | 4072 | CUCGCCAAGGAGGCGUGAC |
| siRNA 437 | 437 | UCACGCCUCCUUGGCGAGA | 4073 | UCUCGCCAAGGAGGCGUGA |
| siRNA 438 | 438 | CACGCCUCCUUGGCGAGAA | 4074 | UUCUCGCCAAGGAGGCGUG |
| siRNA 439 | 439 | ACGCCUCCUUGGCGAGAAA | 4075 | UUUCUCGCCAAGGAGGCGU |
| siRNA 440 | 440 | CGCCUCCUUGGCGAGAAAG | 4076 | CUUUCUCGCCAAGGAGGCG |
| siRNA 441 | 441 | GCCUCCUUGGCGAGAAAGC | 4077 | GCUUUCUCGCCAAGGAGGC |
| siRNA 442 | 442 | CCUCCUUGGCGAGAAAGCG | 4078 | CGCUUUCUCGCCAAGGAGG |
| siRNA 443 | 443 | CUCCUUGGCGAGAAAGCGC | 4079 | GCGCUUUCUCGCCAAGGAG |
| siRNA 444 | 444 | UCCUUGGCGAGAAAGCGCC | 4080 | GGCGCUUUCUCGCCAAGGA |
| siRNA 445 | 445 | CCUUGGCGAGAAAGCGCCU | 4081 | AGGCGCUUUCUCGCCAAGG |
| siRNA 446 | 446 | CUUGGCGAGAAAGCGCCUC | 4082 | GAGGCGCUUUCUCGCCAAG |
| siRNA 447 | 447 | UUGGCGAGAAAGCGCCUCG | 4083 | CGAGGCGCUUUCUCGCCAA |
| siRNA 448 | 448 | UGGCGAGAAAGCGCCUCGC | 4084 | GCGAGGCGCUUUCUCGCCA |
| siRNA 449 | 449 | GGCGAGAAAGCGCCUCGCA | 4085 | UGCGAGGCGCUUUCUCGCC |
| siRNA 450 | 450 | GCGAGAAAGCGCCUCGCAU | 4086 | AUGCGAGGCGCUUUCUCGC |
| siRNA 451 | 451 | CGAGAAAGCGCCUCGCAUU | 4087 | AAUGCGAGGCGCUUUCUCG |
| siRNA 452 | 452 | GAGAAAGCGCCUCGCAUUU | 4088 | AAAUGCGAGGCGCUUUCUC |
| siRNA 453 | 453 | AGAAAGCGCCUCGCAUUUG | 4089 | CAAAUGCGAGGCGCUUUCU |
| siRNA 454 | 454 | GAAAGCGCCUCGCAUUUGA | 4090 | UCAAAUGCGAGGCGCUUUC |
| siRNA 455 | 455 | AAAGCGCCUCGCAUUUGAU | 4091 | AUCAAAUGCGAGGCGCUUU |
| siRNA 456 | 456 | AAGCGCCUCGCAUUUGAUU | 4092 | AAUCAAAUGCGAGGCGCUU |
| siRNA 457 | 457 | AGCGCCUCGCAUUUGAUUG | 4093 | CAAUCAAAUGCGAGGCGCU |
| siRNA 458 | 458 | GCGCCUCGCAUUUGAUUGC | 4094 | GCAAUCAAAUGCGAGGCGC |
| siRNA 459 | 459 | CGCCUCGCAUUUGAUUGCU | 4095 | AGCAAUCAAAUGCGAGGCG |
| siRNA 460 | 460 | GCCUCGCAUUUGAUUGCUU | 4096 | AAGCAAUCAAAUGCGAGGC |
| siRNA 461 | 461 | CCUCGCAUUUGAUUGCUUC | 4097 | GAAGCAAUCAAAUGCGAGG |
| siRNA 462 | 462 | CUCGCAUUUGAUUGCUUCC | 4098 | GGAAGCAAUCAAAUGCGAG |
| siRNA 463 | 463 | UCGCAUUUGAUUGCUUCCA | 4099 | UGGAAGCAAUCAAAUGCGA |
| siRNA 464 | 464 | CGCAUUUGAUUGCUUCCAG | 4100 | CUGGAAGCAAUCAAAUGCG |
| siRNA 465 | 465 | GCAUUUGAUUGCUUCCAGU | 4101 | ACUGGAAGCAAUCAAAUGC |
| siRNA 466 | 466 | CAUUUGAUUGCUUCCAGUU | 4102 | AACUGGAAGCAAUCAAAUG |
| siRNA 467 | 467 | AUUUGAUUGCUUCCAGUUA | 4103 | UAACUGGAAGCAAUCAAAU |
| siRNA 468 | 468 | UUUGAUUGCUUCCAGUUAU | 4104 | AUAACUGGAAGCAAUCAAA |
| siRNA 469 | 469 | UUGAUUGCUUCCAGUUAUU | 4105 | AAUAACUGGAAGCAAUCAA |
| siRNA 470 | 470 | UGAUUGCUUCCAGUUAUUG | 4106 | CAAUAACUGGAAGCAAUCA |
| siRNA 471 | 471 | GAUUGCUUCCAGUUAUUGC | 4107 | GCAAUAACUGGAAGCAAUC |
| siRNA 472 | 472 | AUUGCUUCCAGUUAUUGCA | 4108 | UGCAAUAACUGGAAGCAAU |
| siRNA 473 | 473 | UUGCUUCCAGUUAUUGCAG | 4109 | CUGCAAUAACUGGAAGCAA |
| siRNA 474 | 474 | UGCUUCCAGUUAUUGCAGA | 4110 | UCUGCAAUAACUGGAAGCA |
| siRNA 475 | 475 | GCUUCCAGUUAUUGCAGAA | 4111 | UUCUGCAAUAACUGGAAGC |
| siRNA 476 | 476 | CUUCCAGUUAUUGCAGAAC | 4112 | GUUCUGCAAUAACUGGAAG |
| siRNA 477 | 477 | UUCCAGUUAUUGCAGAACU | 4113 | AGUUCUGCAAUAACUGGAA |
| siRNA 478 | 478 | UCCAGUUAUUGCAGAACUU | 4114 | AAGUUCUGCAAUAACUGGA |
| siRNA 479 | 479 | CCAGUUAUUGCAGAACUUC | 4115 | GAAGUUCUGCAAUAACUGG |
| siRNA 480 | 480 | CAGUUAUUGCAGAACUUCC | 4116 | GGAAGUUCUGCAAUAACUG |
| siRNA 481 | 481 | AGUUAUUGCAGAACUUCCU | 4117 | AGGAAGUUCUGCAAUAACU |
| siRNA 482 | 482 | GUUAUUGCAGAACUUCCUG | 4118 | CAGGAAGUUCUGCAAUAAC |
| siRNA 483 | 483 | UUAUUGCAGAACUUCCUGU | 4119 | ACAGGAAGUUCUGCAAUAA |
| siRNA 484 | 484 | UAUUGCAGAACUUCCUGUC | 4120 | GACAGGAAGUUCUGCAAUA |
| siRNA 485 | 485 | AUUGCAGAACUUCCUGUCC | 4121 | GGACAGGAAGUUCUGCAAU |
| siRNA 486 | 486 | UUGCAGAACUUCCUGUCCU | 4122 | AGGACAGGAAGUUCUGCAA |
| siRNA 487 | 487 | UGCAGAACUUCCUGUCCUG | 4123 | CAGGACAGGAAGUUCUGCA |
| siRNA 488 | 488 | GCAGAACUUCCUGUCCUGG | 4124 | CCAGGACAGGAAGUUCUGC |
| siRNA 489 | 489 | CAGAACUUCCUGUCCUGGU | 4125 | ACCAGGACAGGAAGUUCUG |
| siRNA 490 | 490 | AGAACUUCCUGUCCUGGUG | 4126 | CACCAGGACAGGAAGUUCU |
| siRNA 491 | 491 | GAACUUCCUGUCCUGGUGG | 4127 | CCACCAGGACAGGAAGUUC |
| siRNA 492 | 492 | AACUUCCUGUCCUGGUGGA | 4128 | UCCACCAGGACAGGAAGUU |
| siRNA 493 | 493 | ACUUCCUGUCCUGGUGGAG | 4129 | CUCCACCAGGACAGGAAGU |
| siRNA 494 | 494 | CUUCCUGUCCUGGUGGAGA | 4130 | UCUCCACCAGGACAGGAAG |
| siRNA 495 | 495 | UUCCUGUCCUGGUGGAGAA | 4131 | UUCUCCACCAGGACAGGAA |
| siRNA 496 | 496 | UCCUGUCCUGGUGGAGAAG | 4132 | CUUCUCCACCAGGACAGGA |
| siRNA 497 | 497 | CCUGUCCUGGUGGAGAAGC | 4133 | GCUUCUCCACCAGGACAGG |
| siRNA 498 | 498 | CUGUCCUGGUGGAGAAGCG | 4134 | CGCUUCUCCACCAGGACAG |
| siRNA 499 | 499 | UGUCCUGGUGGAGAAGCGG | 4135 | CCGCUUCUCCACCAGGACA |
| siRNA 500 | 500 | GUCCUGGUGGAGAAGCGGG | 4136 | CCCGCUUCUCCACCAGGAC |
| siRNA 501 | 501 | UCCUGGUGGAGAAGCGGGU | 4137 | ACCCGCUUCUCCACCAGGA |
| siRNA 502 | 502 | CCUGGUGGAGAAGCGGGUC | 4138 | GACCCGCUUCUCCACCAGG |
| siRNA 503 | 503 | CUGGUGGAGAAGCGGGUCU | 4139 | AGACCCGCUUCUCCACCAG |
| siRNA 504 | 504 | UGGUGGAGAAGCGGGUCUC | 4140 | GAGACCCGCUUCUCCACCA |
| siRNA 505 | 505 | GGUGGAGAAGCGGGUCUCG | 4141 | CGAGACCCGCUUCUCCACC |
| siRNA 506 | 506 | GUGGAGAAGCGGGUCUCGC | 4142 | GCGAGACCCGCUUCUCCAC |
| siRNA 507 | 507 | UGGAGAAGCGGGUCUCGCU | 4143 | AGCGAGACCCGCUUCUCCA |
| siRNA 508 | 508 | GGAGAAGCGGGUCUCGCUU | 4144 | AAGCGAGACCCGCUUCUCC |
| siRNA 509 | 509 | GAGAAGCGGGUCUCGCUUG | 4145 | CAAGCGAGACCCGCUUCUC |
| siRNA 510 | 510 | AGAAGCGGGUCUCGCUUGG | 4146 | CCAAGCGAGACCCGCUUCU |
| siRNA 511 | 511 | GAAGCGGGUCUCGCUUGGG | 4147 | CCCAAGCGAGACCCGCUUC |
| siRNA 512 | 512 | AAGCGGGUCUCGCUUGGGU | 4148 | ACCCAAGCGAGACCCGCUU |
| siRNA 513 | 513 | AGCGGGUCUCGCUUGGGUU | 4149 | AACCCAAGCGAGACCCGCU |
| siRNA 514 | 514 | GCGGGUCUCGCUUGGGUUC | 4150 | GAACCCAAGCGAGACCCGC |
| siRNA 515 | 515 | CGGGUCUCGCUUGGGUUCC | 4151 | GGAACCCAAGCGAGACCCG |
| siRNA 516 | 516 | GGGUCUCGCUUGGGUUCCG | 4152 | CGGAACCCAAGCGAGACCC |
| siRNA 517 | 517 | GGUCUCGCUUGGGUUCCGC | 4153 | GCGGAACCCAAGCGAGACC |
| siRNA 518 | 518 | GUCUCGCUUGGGUUCCGCU | 4154 | AGCGGAACCCAAGCGAGAC |
| siRNA 519 | 519 | UCUCGCUUGGGUUCCGCUA | 4155 | UAGCGGAACCCAAGCGAGA |
| siRNA 520 | 520 | CUCGCUUGGGUUCCGCUAA | 4156 | UUAGCGGAACCCAAGCGAG |
| siRNA 521 | 521 | UCGCUUGGGUUCCGCUAAU | 4157 | AUUAGCGGAACCCAAGCGA |
| siRNA 522 | 522 | CGCUUGGGUUCCGCUAAUU | 4158 | AAUUAGCGGAACCCAAGCG |
| siRNA 523 | 523 | GCUUGGGUUCCGCUAAUUU | 4159 | AAAUUAGCGGAACCCAAGC |
| siRNA 524 | 524 | CUUGGGUUCCGCUAAUUUC | 4160 | GAAAUUAGCGGAACCCAAG |
| siRNA 525 | 525 | UUGGGUUCCGCUAAUUUCU | 4161 | AGAAAUUAGCGGAACCCAA |
| siRNA 526 | 526 | UGGGUUCCGCUAAUUUCUG | 4162 | CAGAAAUUAGCGGAACCCA |
| siRNA 527 | 527 | GGGUUCCGCUAAUUUCUGU | 4163 | ACAGAAAUUAGCGGAACCC |
| siRNA 528 | 528 | GGUUCCGCUAAUUUCUGUC | 4164 | GACAGAAAUUAGCGGAACC |
| siRNA 529 | 529 | GUUCCGCUAAUUUCUGUCC | 4165 | GGACAGAAAUUAGCGGAAC |
| siRNA 530 | 530 | UUCCGCUAAUUUCUGUCCU | 4166 | AGGACAGAAAUUAGCGGAA |
| siRNA 531 | 531 | UCCGCUAAUUUCUGUCCUG | 4167 | CAGGACAGAAAUUAGCGGA |
| siRNA 532 | 532 | CCGCUAAUUUCUGUCCUGA | 4168 | UCAGGACAGAAAUUAGCGG |
| siRNA 533 | 533 | CGCUAAUUUCUGUCCUGAG | 4169 | CUCAGGACAGAAAUUAGCG |
| siRNA 534 | 534 | GCUAAUUUCUGUCCUGAGG | 4170 | CCUCAGGACAGAAAUUAGC |
| siRNA 535 | 535 | CUAAUUUCUGUCCUGAGGC | 4171 | GCCUCAGGACAGAAAUUAG |
| siRNA 536 | 536 | UAAUUUCUGUCCUGAGGCG | 4172 | CGCCUCAGGACAGAAAUUA |
| siRNA 537 | 537 | AAUUUCUGUCCUGAGGCGU | 4173 | ACGCCUCAGGACAGAAAUU |
| siRNA 538 | 538 | AUUUCUGUCCUGAGGCGUG | 4174 | CACGCCUCAGGACAGAAAU |
| siRNA 539 | 539 | UUUCUGUCCUGAGGCGUGA | 4175 | UCACGCCUCAGGACAGAAA |
| siRNA 540 | 540 | UUCUGUCCUGAGGCGUGAG | 4176 | CUCACGCCUCAGGACAGAA |
| siRNA 541 | 541 | UCUGUCCUGAGGCGUGAGA | 4177 | UCUCACGCCUCAGGACAGA |
| siRNA 542 | 542 | CUGUCCUGAGGCGUGAGAC | 4178 | GUCUCACGCCUCAGGACAG |
| siRNA 543 | 543 | UGUCCUGAGGCGUGAGACU | 4179 | AGUCUCACGCCUCAGGACA |
| siRNA 544 | 544 | GUCCUGAGGCGUGAGACUG | 4180 | CAGUCUCACGCCUCAGGAC |
| siRNA 545 | 545 | UCCUGAGGCGUGAGACUGA | 4181 | UCAGUCUCACGCCUCAGGA |
| siRNA 546 | 546 | CCUGAGGCGUGAGACUGAG | 4182 | CUCAGUCUCACGCCUCAGG |
| siRNA 547 | 547 | CUGAGGCGUGAGACUGAGU | 4183 | ACUCAGUCUCACGCCUCAG |
| siRNA 548 | 548 | UGAGGCGUGAGACUGAGUU | 4184 | AACUCAGUCUCACGCCUCA |
| siRNA 549 | 549 | GAGGCGUGAGACUGAGUUC | 4185 | GAACUCAGUCUCACGCCUC |
| siRNA 550 | 550 | AGGCGUGAGACUGAGUUCA | 4186 | UGAACUCAGUCUCACGCCU |
| siRNA 551 | 551 | GGCGUGAGACUGAGUUCAU | 4187 | AUGAACUCAGUCUCACGCC |
| siRNA 552 | 552 | GCGUGAGACUGAGUUCAUA | 4188 | UAUGAACUCAGUCUCACGC |
| siRNA 553 | 553 | CGUGAGACUGAGUUCAUAG | 4189 | CUAUGAACUCAGUCUCACG |
| siRNA 554 | 554 | GUGAGACUGAGUUCAUAGG | 4190 | CCUAUGAACUCAGUCUCAC |
| siRNA 555 | 555 | UGAGACUGAGUUCAUAGGG | 4191 | CCCUAUGAACUCAGUCUCA |
| siRNA 556 | 556 | GAGACUGAGUUCAUAGGGU | 4192 | ACCCUAUGAACUCAGUCUC |
| siRNA 557 | 557 | AGACUGAGUUCAUAGGGUC | 4193 | GACCCUAUGAACUCAGUCU |
| siRNA 558 | 558 | GACUGAGUUCAUAGGGUCC | 4194 | GGACCCUAUGAACUCAGUC |
| siRNA 559 | 559 | ACUGAGUUCAUAGGGUCCU | 4195 | AGGACCCUAUGAACUCAGU |
| siRNA 560 | 560 | CUGAGUUCAUAGGGUCCUG | 4196 | CAGGACCCUAUGAACUCAG |
| siRNA 561 | 561 | UGAGUUCAUAGGGUCCUGG | 4197 | CCAGGACCCUAUGAACUCA |
| siRNA 562 | 562 | GAGUUCAUAGGGUCCUGGG | 4198 | CCCAGGACCCUAUGAACUC |
| siRNA 563 | 563 | AGUUCAUAGGGUCCUGGGU | 4199 | ACCCAGGACCCUAUGAACU |
| siRNA 564 | 564 | GUUCAUAGGGUCCUGGGUC | 4200 | GACCCAGGACCCUAUGAAC |
| siRNA 565 | 565 | UUCAUAGGGUCCUGGGUCC | 4201 | GGACCCAGGACCCUAUGAA |
| siRNA 566 | 566 | UCAUAGGGUCCUGGGUCCC | 4202 | GGGACCCAGGACCCUAUGA |
| siRNA 567 | 567 | CAUAGGGUCCUGGGUCCCC | 4203 | GGGGACCCAGGACCCUAUG |
| siRNA 568 | 568 | AUAGGGUCCUGGGUCCCCG | 4204 | CGGGGACCCAGGACCCUAU |
| siRNA 569 | 569 | UAGGGUCCUGGGUCCCCGA | 4205 | UCGGGGACCCAGGACCCUA |
| siRNA 570 | 570 | AGGGUCCUGGGUCCCCGAA | 4206 | UUCGGGGACCCAGGACCCU |
| siRNA 571 | 571 | GGGUCCUGGGUCCCCGAAC | 4207 | GUUCGGGGACCCAGGACCC |
| siRNA 572 | 572 | GGUCCUGGGUCCCCGAACC | 4208 | GGUUCGGGGACCCAGGACC |
| siRNA 573 | 573 | GUCCUGGGUCCCCGAACCA | 4209 | UGGUUCGGGGACCCAGGAC |
| siRNA 574 | 574 | UCCUGGGUCCCCGAACCAG | 4210 | CUGGUUCGGGGACCCAGGA |
| siRNA 575 | 575 | CCUGGGUCCCCGAACCAGG | 4211 | CCUGGUUCGGGGACCCAGG |
| siRNA 576 | 576 | CUGGGUCCCCGAACCAGGA | 4212 | UCCUGGUUCGGGGACCCAG |
| siRNA 577 | 577 | UGGGUCCCCGAACCAGGAA | 4213 | UUCCUGGUUCGGGGACCCA |
| siRNA 578 | 578 | GGGUCCCCGAACCAGGAAG | 4214 | CUUCCUGGUUCGGGGACCC |
| siRNA 579 | 579 | GGUCCCCGAACCAGGAAGG | 4215 | CCUUCCUGGUUCGGGGACC |
| siRNA 580 | 580 | GUCCCCGAACCAGGAAGGG | 4216 | CCCUUCCUGGUUCGGGGAC |
| siRNA 581 | 581 | UCCCCGAACCAGGAAGGGU | 4217 | ACCCUUCCUGGUUCGGGGA |
| siRNA 582 | 582 | CCCCGAACCAGGAAGGGUU | 4218 | AACCCUUCCUGGUUCGGGG |
| siRNA 583 | 583 | CCCGAACCAGGAAGGGUUG | 4219 | CAACCCUUCCUGGUUCGGG |
| siRNA 584 | 584 | CCGAACCAGGAAGGGUUGA | 4220 | UCAACCCUUCCUGGUUCGG |
| siRNA 585 | 585 | CGAACCAGGAAGGGUUGAG | 4221 | CUCAACCCUUCCUGGUUCG |
| siRNA 586 | 586 | GAACCAGGAAGGGUUGAGG | 4222 | CCUCAACCCUUCCUGGUUC |
| siRNA 587 | 587 | AACCAGGAAGGGUUGAGGG | 4223 | CCCUCAACCCUUCCUGGUU |
| siRNA 588 | 588 | ACCAGGAAGGGUUGAGGGA | 4224 | UCCCUCAACCCUUCCUGGU |
| siRNA 589 | 589 | CCAGGAAGGGUUGAGGGAA | 4225 | UUCCCUCAACCCUUCCUGG |
| siRNA 590 | 590 | CAGGAAGGGUUGAGGGAAC | 4226 | GUUCCCUCAACCCUUCCUG |
| siRNA 591 | 591 | AGGAAGGGUUGAGGGAACA | 4227 | UGUUCCCUCAACCCUUCCU |
| siRNA 592 | 592 | GGAAGGGUUGAGGGAACAC | 4228 | GUGUUCCCUCAACCCUUCC |
| siRNA 593 | 593 | GAAGGGUUGAGGGAACACA | 4229 | UGUGUUCCCUCAACCCUUC |
| siRNA 594 | 594 | AAGGGUUGAGGGAACACAA | 4230 | UUGUGUUCCCUCAACCCUU |
| siRNA 595 | 595 | AGGGUUGAGGGAACACAAU | 4231 | AUUGUGUUCCCUCAACCCU |
| siRNA 596 | 596 | GGGUUGAGGGAACACAAUC | 4232 | GAUUGUGUUCCCUCAACCC |
| siRNA 597 | 597 | GGUUGAGGGAACACAAUCU | 4233 | AGAUUGUGUUCCCUCAACC |
| siRNA 598 | 598 | GUUGAGGGAACACAAUCUG | 4234 | CAGAUUGUGUUCCCUCAAC |
| siRNA 599 | 599 | UUGAGGGAACACAAUCUGC | 4235 | GCAGAUUGUGUUCCCUCAA |
| siRNA 600 | 600 | UGAGGGAACACAAUCUGCA | 4236 | UGCAGAUUGUGUUCCCUCA |
| siRNA 601 | 601 | GAGGGAACACAAUCUGCAA | 4237 | UUGCAGAUUGUGUUCCCUC |
| siRNA 602 | 602 | AGGGAACACAAUCUGCAAG | 4238 | CUUGCAGAUUGUGUUCCCU |
| siRNA 603 | 603 | GGGAACACAAUCUGCAAGC | 4239 | GCUUGCAGAUUGUGUUCCC |
| siRNA 604 | 604 | GGAACACAAUCUGCAAGCC | 4240 | GGCUUGCAGAUUGUGUUCC |
| siRNA 605 | 605 | GAACACAAUCUGCAAGCCC | 4241 | GGGCUUGCAGAUUGUGUUC |
| siRNA 606 | 606 | AACACAAUCUGCAAGCCCC | 4242 | GGGGCUUGCAGAUUGUGUU |
| siRNA 607 | 607 | ACACAAUCUGCAAGCCCCC | 4243 | GGGGGCUUGCAGAUUGUGU |
| siRNA 608 | 608 | CACAAUCUGCAAGCCCCCG | 4244 | CGGGGGCUUGCAGAUUGUG |
| siRNA 609 | 609 | ACAAUCUGCAAGCCCCCGC | 4245 | GCGGGGGCUUGCAGAUUGU |
| siRNA 610 | 610 | CAAUCUGCAAGCCCCCGCG | 4246 | CGCGGGGGCUUGCAGAUUG |
| siRNA 611 | 611 | AAUCUGCAAGCCCCCGCGA | 4247 | UCGCGGGGGCUUGCAGAUU |
| siRNA 612 | 612 | AUCUGCAAGCCCCCGCGAC | 4248 | GUCGCGGGGGCUUGCAGAU |
| siRNA 613 | 613 | UCUGCAAGCCCCCGCGACC | 4249 | GGUCGCGGGGGCUUGCAGA |
| siRNA 614 | 614 | CUGCAAGCCCCCGCGACCC | 4250 | GGGUCGCGGGGGCUUGCAG |
| siRNA 615 | 615 | UGCAAGCCCCCGCGACCCA | 4251 | UGGGUCGCGGGGGCUUGCA |
| siRNA 616 | 616 | GCAAGCCCCCGCGACCCAA | 4252 | UUGGGUCGCGGGGGCUUGC |
| siRNA 617 | 617 | CAAGCCCCCGCGACCCAAG | 4253 | CUUGGGUCGCGGGGGCUUG |
| siRNA 618 | 618 | AAGCCCCCGCGACCCAAGU | 4254 | ACUUGGGUCGCGGGGGCUU |
| siRNA 619 | 619 | AGCCCCCGCGACCCAAGUG | 4255 | CACUUGGGUCGCGGGGGCU |
| siRNA 620 | 620 | GCCCCCGCGACCCAAGUGA | 4256 | UCACUUGGGUCGCGGGGGC |
| siRNA 621 | 621 | CCCCCGCGACCCAAGUGAG | 4257 | CUCACUUGGGUCGCGGGGG |
| siRNA 622 | 622 | CCCCGCGACCCAAGUGAGG | 4258 | CCUCACUUGGGUCGCGGGG |
| siRNA 623 | 623 | CCCGCGACCCAAGUGAGGG | 4259 | CCCUCACUUGGGUCGCGGG |
| siRNA 624 | 624 | CCGCGACCCAAGUGAGGGG | 4260 | CCCCUCACUUGGGUCGCGG |
| siRNA 625 | 625 | CGCGACCCAAGUGAGGGGC | 4261 | GCCCCUCACUUGGGUCGCG |
| siRNA 626 | 626 | GCGACCCAAGUGAGGGGCC | 4262 | GGCCCCUCACUUGGGUCGC |
| siRNA 627 | 627 | CGACCCAAGUGAGGGGCCC | 4263 | GGGCCCCUCACUUGGGUCG |
| siRNA 628 | 628 | GACCCAAGUGAGGGGCCCC | 4264 | GGGGCCCCUCACUUGGGUC |
| siRNA 629 | 629 | ACCCAAGUGAGGGGCCCCG | 4265 | CGGGGCCCCUCACUUGGGU |
| siRNA 630 | 630 | CCCAAGUGAGGGGCCCCGU | 4266 | ACGGGGCCCCUCACUUGGG |
| siRNA 631 | 631 | CCAAGUGAGGGGCCCCGUG | 4267 | CACGGGGCCCCUCACUUGG |
| siRNA 632 | 632 | CAAGUGAGGGGCCCCGUGU | 4268 | ACACGGGGCCCCUCACUUG |
| siRNA 633 | 633 | AAGUGAGGGGCCCCGUGUU | 4269 | AACACGGGGCCCCUCACUU |
| siRNA 634 | 634 | AGUGAGGGGCCCCGUGUUG | 4270 | CAACACGGGGCCCCUCACU |
| siRNA 635 | 635 | GUGAGGGGCCCCGUGUUGG | 4271 | CCAACACGGGGCCCCUCAC |
| siRNA 636 | 636 | UGAGGGGCCCCGUGUUGGG | 4272 | CCCAACACGGGGCCCCUCA |
| siRNA 637 | 637 | GAGGGGCCCCGUGUUGGGG | 4273 | CCCCAACACGGGGCCCCUC |
| siRNA 638 | 638 | AGGGGCCCCGUGUUGGGGU | 4274 | ACCCCAACACGGGGCCCCU |
| siRNA 639 | 639 | GGGGCCCCGUGUUGGGGUC | 4275 | GACCCCAACACGGGGCCCC |
| siRNA 640 | 640 | GGGCCCCGUGUUGGGGUCC | 4276 | GGACCCCAACACGGGGCCC |
| siRNA 641 | 641 | GGCCCCGUGUUGGGGUCCU | 4277 | AGGACCCCAACACGGGGCC |
| siRNA 642 | 642 | GCCCCGUGUUGGGGUCCUC | 4278 | GAGGACCCCAACACGGGGC |
| siRNA 643 | 643 | CCCCGUGUUGGGGUCCUCC | 4279 | GGAGGACCCCAACACGGGG |
| siRNA 644 | 644 | CCCGUGUUGGGGUCCUCCC | 4280 | GGGAGGACCCCAACACGGG |
| siRNA 645 | 645 | CCGUGUUGGGGUCCUCCCU | 4281 | AGGGAGGACCCCAACACGG |
| siRNA 646 | 646 | CGUGUUGGGGUCCUCCCUC | 4282 | GAGGGAGGACCCCAACACG |
| siRNA 647 | 647 | GUGUUGGGGUCCUCCCUCC | 4283 | GGAGGGAGGACCCCAACAC |
| siRNA 648 | 648 | UGUUGGGGUCCUCCCUCCC | 4284 | GGGAGGGAGGACCCCAACA |
| siRNA 649 | 649 | GUUGGGGUCCUCCCUCCCU | 4285 | AGGGAGGGAGGACCCCAAC |
| siRNA 650 | 650 | UUGGGGUCCUCCCUCCCUU | 4286 | AAGGGAGGGAGGACCCCAA |
| siRNA 651 | 651 | UGGGGUCCUCCCUCCCUUU | 4287 | AAAGGGAGGGAGGACCCCA |
| siRNA 652 | 652 | GGGGUCCUCCCUCCCUUUG | 4288 | CAAAGGGAGGGAGGACCCC |
| siRNA 653 | 653 | GGGUCCUCCCUCCCUUUGC | 4289 | GCAAAGGGAGGGAGGACCC |
| siRNA 654 | 654 | GGUCCUCCCUCCCUUUGCA | 4290 | UGCAAAGGGAGGGAGGACC |
| siRNA 655 | 655 | GUCCUCCCUCCCUUUGCAU | 4291 | AUGCAAAGGGAGGGAGGAC |
| siRNA 656 | 656 | UCCUCCCUCCCUUUGCAUU | 4292 | AAUGCAAAGGGAGGGAGGA |
| siRNA 657 | 657 | CCUCCCUCCCUUUGCAUUC | 4293 | GAAUGCAAAGGGAGGGAGG |
| siRNA 658 | 658 | CUCCCUCCCUUUGCAUUCC | 4294 | GGAAUGCAAAGGGAGGGAG |
| siRNA 659 | 659 | UCCCUCCCUUUGCAUUCCC | 4295 | GGGAAUGCAAAGGGAGGGA |
| siRNA 660 | 660 | CCCUCCCUUUGCAUUCCCA | 4296 | UGGGAAUGCAAAGGGAGGG |
| siRNA 661 | 661 | CCUCCCUUUGCAUUCCCAC | 4297 | GUGGGAAUGCAAAGGGAGG |
| siRNA 662 | 662 | CUCCCUUUGCAUUCCCACC | 4298 | GGUGGGAAUGCAAAGGGAG |
| siRNA 663 | 663 | UCCCUUUGCAUUCCCACCC | 4299 | GGGUGGGAAUGCAAAGGGA |
| siRNA 664 | 664 | CCCUUUGCAUUCCCACCCC | 4300 | GGGGUGGGAAUGCAAAGGG |
| siRNA 665 | 665 | CCUUUGCAUUCCCACCCCU | 4301 | AGGGGUGGGAAUGCAAAGG |
| siRNA 666 | 666 | CUUUGCAUUCCCACCCCUC | 4302 | GAGGGGUGGGAAUGCAAAG |
| siRNA 667 | 667 | UUUGCAUUCCCACCCCUCC | 4303 | GGAGGGGUGGGAAUGCAAA |
| siRNA 668 | 668 | UUGCAUUCCCACCCCUCCG | 4304 | CGGAGGGGUGGGAAUGCAA |
| siRNA 669 | 669 | UGCAUUCCCACCCCUCCGG | 4305 | CCGGAGGGGUGGGAAUGCA |
| siRNA 670 | 670 | GCAUUCCCACCCCUCCGGG | 4306 | CCCGGAGGGGUGGGAAUGC |
| siRNA 671 | 671 | CAUUCCCACCCCUCCGGGC | 4307 | GCCCGGAGGGGUGGGAAUG |
| siRNA 672 | 672 | AUUCCCACCCCUCCGGGCU | 4308 | AGCCCGGAGGGGUGGGAAU |
| siRNA 673 | 673 | UUCCCACCCCUCCGGGCUU | 4309 | AAGCCCGGAGGGGUGGGAA |
| siRNA 674 | 674 | UCCCACCCCUCCGGGCUUU | 4310 | AAAGCCCGGAGGGGUGGGA |
| siRNA 675 | 675 | CCCACCCCUCCGGGCUUUG | 4311 | CAAAGCCCGGAGGGGUGGG |
| siRNA 676 | 676 | CCACCCCUCCGGGCUUUGC | 4312 | GCAAAGCCCGGAGGGGUGG |
| siRNA 677 | 677 | CACCCCUCCGGGCUUUGCG | 4313 | CGCAAAGCCCGGAGGGGUG |
| siRNA 678 | 678 | ACCCCUCCGGGCUUUGCGU | 4314 | ACGCAAAGCCCGGAGGGGU |
| siRNA 679 | 679 | CCCCUCCGGGCUUUGCGUC | 4315 | GACGCAAAGCCCGGAGGGG |
| siRNA 680 | 680 | CCCUCCGGGCUUUGCGUCU | 4316 | AGACGCAAAGCCCGGAGGG |
| siRNA 681 | 681 | CCUCCGGGCUUUGCGUCUU | 4317 | AAGACGCAAAGCCCGGAGG |
| siRNA 682 | 682 | CUCCGGGCUUUGCGUCUUC | 4318 | GAAGACGCAAAGCCCGGAG |
| siRNA 683 | 683 | UCCGGGCUUUGCGUCUUCC | 4319 | GGAAGACGCAAAGCCCGGA |
| siRNA 684 | 684 | CCGGGCUUUGCGUCUUCCU | 4320 | AGGAAGACGCAAAGCCCGG |
| siRNA 685 | 685 | CGGGCUUUGCGUCUUCCUG | 4321 | CAGGAAGACGCAAAGCCCG |
| siRNA 686 | 686 | GGGCUUUGCGUCUUCCUGG | 4322 | CCAGGAAGACGCAAAGCCC |
| siRNA 687 | 687 | GGCUUUGCGUCUUCCUGGG | 4323 | CCCAGGAAGACGCAAAGCC |
| siRNA 688 | 688 | GCUUUGCGUCUUCCUGGGG | 4324 | CCCCAGGAAGACGCAAAGC |
| siRNA 689 | 689 | CUUUGCGUCUUCCUGGGGA | 4325 | UCCCCAGGAAGACGCAAAG |
| siRNA 690 | 690 | UUUGCGUCUUCCUGGGGAC | 4326 | GUCCCCAGGAAGACGCAAA |
| siRNA 691 | 691 | UUGCGUCUUCCUGGGGACC | 4327 | GGUCCCCAGGAAGACGCAA |
| siRNA 692 | 692 | UGCGUCUUCCUGGGGACCC | 4328 | GGGUCCCCAGGAAGACGCA |
| siRNA 693 | 693 | GCGUCUUCCUGGGGACCCC | 4329 | GGGGUCCCCAGGAAGACGC |
| siRNA 694 | 694 | CGUCUUCCUGGGGACCCCC | 4330 | GGGGGUCCCCAGGAAGACG |
| siRNA 695 | 695 | GUCUUCCUGGGGACCCCCU | 4331 | AGGGGGUCCCCAGGAAGAC |
| siRNA 696 | 696 | UCUUCCUGGGGACCCCCUC | 4332 | GAGGGGGUCCCCAGGAAGA |
| siRNA 697 | 697 | CUUCCUGGGGACCCCCUCG | 4333 | CGAGGGGGUCCCCAGGAAG |
| siRNA 698 | 698 | UUCCUGGGGACCCCCUCGC | 4334 | GCGAGGGGGUCCCCAGGAA |
| siRNA 699 | 699 | UCCUGGGGACCCCCUCGCC | 4335 | GGCGAGGGGGUCCCCAGGA |
| siRNA 700 | 700 | CCUGGGGACCCCCUCGCCG | 4336 | CGGCGAGGGGGUCCCCAGG |
| siRNA 701 | 701 | CUGGGGACCCCCUCGCCGG | 4337 | CCGGCGAGGGGGUCCCCAG |
| siRNA 702 | 702 | UGGGGACCCCCUCGCCGGG | 4338 | CCCGGCGAGGGGGUCCCCA |
| siRNA 703 | 703 | GGGGACCCCCUCGCCGGGA | 4339 | UCCCGGCGAGGGGGUCCCC |
| siRNA 704 | 704 | GGGACCCCCUCGCCGGGAG | 4340 | CUCCCGGCGAGGGGGUCCC |
| siRNA 705 | 705 | GGACCCCCUCGCCGGGAGA | 4341 | UCUCCCGGCGAGGGGGUCC |
| siRNA 706 | 706 | GACCCCCUCGCCGGGAGAU | 4342 | AUCUCCCGGCGAGGGGGUC |
| siRNA 707 | 707 | ACCCCCUCGCCGGGAGAUG | 4343 | CAUCUCCCGGCGAGGGGGU |
| siRNA 708 | 708 | CCCCCUCGCCGGGAGAUGG | 4344 | CCAUCUCCCGGCGAGGGGG |
| siRNA 709 | 709 | CCCCUCGCCGGGAGAUGGC | 4345 | GCCAUCUCCCGGCGAGGGG |
| siRNA 710 | 710 | CCCUCGCCGGGAGAUGGCC | 4346 | GGCCAUCUCCCGGCGAGGG |
| siRNA 711 | 711 | CCUCGCCGGGAGAUGGCCG | 4347 | CGGCCAUCUCCCGGCGAGG |
| siRNA 712 | 712 | CUCGCCGGGAGAUGGCCGC | 4348 | GCGGCCAUCUCCCGGCGAG |
| siRNA 713 | 713 | UCGCCGGGAGAUGGCCGCG | 4349 | CGCGGCCAUCUCCCGGCGA |
| siRNA 714 | 714 | CGCCGGGAGAUGGCCGCGU | 4350 | ACGCGGCCAUCUCCCGGCG |
| siRNA 715 | 715 | GCCGGGAGAUGGCCGCGUU | 4351 | AACGCGGCCAUCUCCCGGC |
| siRNA 716 | 716 | CCGGGAGAUGGCCGCGUUG | 4352 | CAACGCGGCCAUCUCCCGG |
| siRNA 717 | 717 | CGGGAGAUGGCCGCGUUGA | 4353 | UCAACGCGGCCAUCUCCCG |
| siRNA 718 | 718 | GGGAGAUGGCCGCGUUGAU | 4354 | AUCAACGCGGCCAUCUCCC |
| siRNA 719 | 719 | GGAGAUGGCCGCGUUGAUG | 4355 | CAUCAACGCGGCCAUCUCC |
| siRNA 720 | 720 | GAGAUGGCCGCGUUGAUGC | 4356 | GCAUCAACGCGGCCAUCUC |
| siRNA 721 | 721 | AGAUGGCCGCGUUGAUGCG | 4357 | CGCAUCAACGCGGCCAUCU |
| siRNA 722 | 722 | GAUGGCCGCGUUGAUGCGG | 4358 | CCGCAUCAACGCGGCCAUC |
| siRNA 723 | 723 | AUGGCCGCGUUGAUGCGGA | 4359 | UCCGCAUCAACGCGGCCAU |
| siRNA 724 | 724 | UGGCCGCGUUGAUGCGGAG | 4360 | CUCCGCAUCAACGCGGCCA |
| siRNA 725 | 725 | GGCCGCGUUGAUGCGGAGC | 4361 | GCUCCGCAUCAACGCGGCC |
| siRNA 726 | 726 | GCCGCGUUGAUGCGGAGCA | 4362 | UGCUCCGCAUCAACGCGGC |
| siRNA 727 | 727 | CCGCGUUGAUGCGGAGCAA | 4363 | UUGCUCCGCAUCAACGCGG |
| siRNA 728 | 728 | CGCGUUGAUGCGGAGCAAG | 4364 | CUUGCUCCGCAUCAACGCG |
| siRNA 729 | 729 | GCGUUGAUGCGGAGCAAGG | 4365 | CCUUGCUCCGCAUCAACGC |
| siRNA 730 | 730 | CGUUGAUGCGGAGCAAGGA | 4366 | UCCUUGCUCCGCAUCAACG |
| siRNA 731 | 731 | GUUGAUGCGGAGCAAGGAU | 4367 | AUCCUUGCUCCGCAUCAAC |
| siRNA 732 | 732 | UUGAUGCGGAGCAAGGAUU | 4368 | AAUCCUUGCUCCGCAUCAA |
| siRNA 733 | 733 | UGAUGCGGAGCAAGGAUUC | 4369 | GAAUCCUUGCUCCGCAUCA |
| siRNA 734 | 734 | GAUGCGGAGCAAGGAUUCG | 4370 | CGAAUCCUUGCUCCGCAUC |
| siRNA 735 | 735 | AUGCGGAGCAAGGAUUCGU | 4371 | ACGAAUCCUUGCUCCGCAU |
| siRNA 736 | 736 | UGCGGAGCAAGGAUUCGUC | 4372 | GACGAAUCCUUGCUCCGCA |
| siRNA 737 | 737 | GCGGAGCAAGGAUUCGUCC | 4373 | GGACGAAUCCUUGCUCCGC |
| siRNA 738 | 738 | CGGAGCAAGGAUUCGUCCU | 4374 | AGGACGAAUCCUUGCUCCG |
| siRNA 739 | 739 | GGAGCAAGGAUUCGUCCUG | 4375 | CAGGACGAAUCCUUGCUCC |
| siRNA 740 | 740 | GAGCAAGGAUUCGUCCUGC | 4376 | GCAGGACGAAUCCUUGCUC |
| siRNA 741 | 741 | AGCAAGGAUUCGUCCUGCU | 4377 | AGCAGGACGAAUCCUUGCU |
| siRNA 742 | 742 | GCAAGGAUUCGUCCUGCUG | 4378 | CAGCAGGACGAAUCCUUGC |
| siRNA 743 | 743 | CAAGGAUUCGUCCUGCUGC | 4379 | GCAGCAGGACGAAUCCUUG |
| siRNA 744 | 744 | AAGGAUUCGUCCUGCUGCC | 4380 | GGCAGCAGGACGAAUCCUU |
| siRNA 745 | 745 | AGGAUUCGUCCUGCUGCCU | 4381 | AGGCAGCAGGACGAAUCCU |
| siRNA 746 | 746 | GGAUUCGUCCUGCUGCCUG | 4382 | CAGGCAGCAGGACGAAUCC |
| siRNA 747 | 747 | GAUUCGUCCUGCUGCCUGC | 4383 | GCAGGCAGCAGGACGAAUC |
| siRNA 748 | 748 | AUUCGUCCUGCUGCCUGCU | 4384 | AGCAGGCAGCAGGACGAAU |
| siRNA 749 | 749 | UUCGUCCUGCUGCCUGCUC | 4385 | GAGCAGGCAGCAGGACGAA |
| siRNA 750 | 750 | UCGUCCUGCUGCCUGCUCC | 4386 | GGAGCAGGCAGCAGGACGA |
| siRNA 751 | 751 | CGUCCUGCUGCCUGCUCCU | 4387 | AGGAGCAGGCAGCAGGACG |
| siRNA 752 | 752 | GUCCUGCUGCCUGCUCCUA | 4388 | UAGGAGCAGGCAGCAGGAC |
| siRNA 753 | 753 | UCCUGCUGCCUGCUCCUAC | 4389 | GUAGGAGCAGGCAGCAGGA |
| siRNA 754 | 754 | CCUGCUGCCUGCUCCUACU | 4390 | AGUAGGAGCAGGCAGCAGG |
| siRNA 755 | 755 | CUGCUGCCUGCUCCUACUG | 4391 | CAGUAGGAGCAGGCAGCAG |
| siRNA 756 | 756 | UGCUGCCUGCUCCUACUGG | 4392 | CCAGUAGGAGCAGGCAGCA |
| siRNA 757 | 757 | GCUGCCUGCUCCUACUGGC | 4393 | GCCAGUAGGAGCAGGCAGC |
| siRNA 758 | 758 | CUGCCUGCUCCUACUGGCC | 4394 | GGCCAGUAGGAGCAGGCAG |
| siRNA 759 | 759 | UGCCUGCUCCUACUGGCCG | 4395 | CGGCCAGUAGGAGCAGGCA |
| siRNA 760 | 760 | GCCUGCUCCUACUGGCCGC | 4396 | GCGGCCAGUAGGAGCAGGC |
| siRNA 761 | 761 | CCUGCUCCUACUGGCCGCG | 4397 | CGCGGCCAGUAGGAGCAGG |
| siRNA 762 | 762 | CUGCUCCUACUGGCCGCGG | 4398 | CCGCGGCCAGUAGGAGCAG |
| siRNA 763 | 763 | UGCUCCUACUGGCCGCGGU | 4399 | ACCGCGGCCAGUAGGAGCA |
| siRNA 764 | 764 | GCUCCUACUGGCCGCGGUG | 4400 | CACCGCGGCCAGUAGGAGC |
| siRNA 765 | 765 | CUCCUACUGGCCGCGGUGC | 4401 | GCACCGCGGCCAGUAGGAG |
| siRNA 766 | 766 | UCCUACUGGCCGCGGUGCU | 4402 | AGCACCGCGGCCAGUAGGA |
| siRNA 767 | 767 | CCUACUGGCCGCGGUGCUG | 4403 | CAGCACCGCGGCCAGUAGG |
| siRNA 768 | 768 | CUACUGGCCGCGGUGCUGA | 4404 | UCAGCACCGCGGCCAGUAG |
| siRNA 769 | 769 | UACUGGCCGCGGUGCUGAU | 4405 | AUCAGCACCGCGGCCAGUA |
| siRNA 770 | 770 | ACUGGCCGCGGUGCUGAUG | 4406 | CAUCAGCACCGCGGCCAGU |
| siRNA 771 | 771 | CUGGCCGCGGUGCUGAUGG | 4407 | CCAUCAGCACCGCGGCCAG |
| siRNA 772 | 772 | UGGCCGCGGUGCUGAUGGU | 4408 | ACCAUCAGCACCGCGGCCA |
| siRNA 773 | 773 | GGCCGCGGUGCUGAUGGUG | 4409 | CACCAUCAGCACCGCGGCC |
| siRNA 774 | 774 | GCCGCGGUGCUGAUGGUGG | 4410 | CCACCAUCAGCACCGCGGC |
| siRNA 775 | 775 | CCGCGGUGCUGAUGGUGGA | 4411 | UCCACCAUCAGCACCGCGG |
| siRNA 776 | 776 | CGCGGUGCUGAUGGUGGAG | 4412 | CUCCACCAUCAGCACCGCG |
| siRNA 777 | 777 | GCGGUGCUGAUGGUGGAGA | 4413 | UCUCCACCAUCAGCACCGC |
| siRNA 778 | 778 | CGGUGCUGAUGGUGGAGAG | 4414 | CUCUCCACCAUCAGCACCG |
| siRNA 779 | 779 | GGUGCUGAUGGUGGAGAGC | 4415 | GCUCUCCACCAUCAGCACC |
| siRNA 780 | 780 | GUGCUGAUGGUGGAGAGCU | 4416 | AGCUCUCCACCAUCAGCAC |
| siRNA 781 | 781 | UGCUGAUGGUGGAGAGCUC | 4417 | GAGCUCUCCACCAUCAGCA |
| siRNA 782 | 782 | GCUGAUGGUGGAGAGCUCA | 4418 | UGAGCUCUCCACCAUCAGC |
| siRNA 783 | 783 | CUGAUGGUGGAGAGCUCAC | 4419 | GUGAGCUCUCCACCAUCAG |
| siRNA 784 | 784 | UGAUGGUGGAGAGCUCACA | 4420 | UGUGAGCUCUCCACCAUCA |
| siRNA 785 | 785 | GAUGGUGGAGAGCUCACAG | 4421 | CUGUGAGCUCUCCACCAUC |
| siRNA 786 | 786 | AUGGUGGAGAGCUCACAGA | 4422 | UCUGUGAGCUCUCCACCAU |
| siRNA 787 | 787 | UGGUGGAGAGCUCACAGAU | 4423 | AUCUGUGAGCUCUCCACCA |
| siRNA 788 | 788 | GGUGGAGAGCUCACAGAUC | 4424 | GAUCUGUGAGCUCUCCACC |
| siRNA 789 | 789 | GUGGAGAGCUCACAGAUCG | 4425 | CGAUCUGUGAGCUCUCCAC |
| siRNA 790 | 790 | UGGAGAGCUCACAGAUCGG | 4426 | CCGAUCUGUGAGCUCUCCA |
| siRNA 791 | 791 | GGAGAGCUCACAGAUCGGC | 4427 | GCCGAUCUGUGAGCUCUCC |
| siRNA 792 | 792 | GAGAGCUCACAGAUCGGCA | 4428 | UGCCGAUCUGUGAGCUCUC |
| siRNA 793 | 793 | AGAGCUCACAGAUCGGCAG | 4429 | CUGCCGAUCUGUGAGCUCU |
| siRNA 794 | 794 | GAGCUCACAGAUCGGCAGU | 4430 | ACUGCCGAUCUGUGAGCUC |
| siRNA 795 | 795 | AGCUCACAGAUCGGCAGUU | 4431 | AACUGCCGAUCUGUGAGCU |
| siRNA 796 | 796 | GCUCACAGAUCGGCAGUUC | 4432 | GAACUGCCGAUCUGUGAGC |
| siRNA 797 | 797 | CUCACAGAUCGGCAGUUCG | 4433 | CGAACUGCCGAUCUGUGAG |
| siRNA 798 | 798 | UCACAGAUCGGCAGUUCGC | 4434 | GCGAACUGCCGAUCUGUGA |
| siRNA 799 | 799 | CACAGAUCGGCAGUUCGCG | 4435 | CGCGAACUGCCGAUCUGUG |
| siRNA 800 | 800 | ACAGAUCGGCAGUUCGCGG | 4436 | CCGCGAACUGCCGAUCUGU |
| siRNA 801 | 801 | CAGAUCGGCAGUUCGCGGG | 4437 | CCCGCGAACUGCCGAUCUG |
| siRNA 802 | 802 | AGAUCGGCAGUUCGCGGGC | 4438 | GCCCGCGAACUGCCGAUCU |
| siRNA 803 | 803 | GAUCGGCAGUUCGCGGGCC | 4439 | GGCCCGCGAACUGCCGAUC |
| siRNA 804 | 804 | AUCGGCAGUUCGCGGGCCA | 4440 | UGGCCCGCGAACUGCCGAU |
| siRNA 805 | 805 | UCGGCAGUUCGCGGGCCAA | 4441 | UUGGCCCGCGAACUGCCGA |
| siRNA 806 | 806 | CGGCAGUUCGCGGGCCAAA | 4442 | UUUGGCCCGCGAACUGCCG |
| siRNA 807 | 807 | GGCAGUUCGCGGGCCAAAC | 4443 | GUUUGGCCCGCGAACUGCC |
| siRNA 808 | 808 | GCAGUUCGCGGGCCAAACU | 4444 | AGUUUGGCCCGCGAACUGC |
| siRNA 809 | 809 | CAGUUCGCGGGCCAAACUC | 4445 | GAGUUUGGCCCGCGAACUG |
| siRNA 810 | 810 | AGUUCGCGGGCCAAACUCA | 4446 | UGAGUUUGGCCCGCGAACU |
| siRNA 811 | 811 | GUUCGCGGGCCAAACUCAA | 4447 | UUGAGUUUGGCCCGCGAAC |
| siRNA 812 | 812 | UUCGCGGGCCAAACUCAAC | 4448 | GUUGAGUUUGGCCCGCGAA |
| siRNA 813 | 813 | UCGCGGGCCAAACUCAACU | 4449 | AGUUGAGUUUGGCCCGCGA |
| siRNA 814 | 814 | CGCGGGCCAAACUCAACUC | 4450 | GAGUUGAGUUUGGCCCGCG |
| siRNA 815 | 815 | GCGGGCCAAACUCAACUCC | 4451 | GGAGUUGAGUUUGGCCCGC |
| siRNA 816 | 816 | CGGGCCAAACUCAACUCCA | 4452 | UGGAGUUGAGUUUGGCCCG |
| siRNA 817 | 817 | GGGCCAAACUCAACUCCAU | 4453 | AUGGAGUUGAGUUUGGCCC |
| siRNA 818 | 818 | GGCCAAACUCAACUCCAUC | 4454 | GAUGGAGUUGAGUUUGGCC |
| siRNA 819 | 819 | GCCAAACUCAACUCCAUCA | 4455 | UGAUGGAGUUGAGUUUGGC |
| siRNA 820 | 820 | CCAAACUCAACUCCAUCAA | 4456 | UUGAUGGAGUUGAGUUUGG |
| siRNA 821 | 821 | CAAACUCAACUCCAUCAAG | 4457 | CUUGAUGGAGUUGAGUUUG |
| siRNA 822 | 822 | AAACUCAACUCCAUCAAGU | 4458 | ACUUGAUGGAGUUGAGUUU |
| siRNA 823 | 823 | AACUCAACUCCAUCAAGUC | 4459 | GACUUGAUGGAGUUGAGUU |
| siRNA 824 | 824 | ACUCAACUCCAUCAAGUCC | 4460 | GGACUUGAUGGAGUUGAGU |
| siRNA 825 | 825 | CUCAACUCCAUCAAGUCCU | 4461 | AGGACUUGAUGGAGUUGAG |
| siRNA 826 | 826 | UCAACUCCAUCAAGUCCUC | 4462 | GAGGACUUGAUGGAGUUGA |
| siRNA 827 | 827 | CAACUCCAUCAAGUCCUCU | 4463 | AGAGGACUUGAUGGAGUUG |
| siRNA 828 | 828 | AACUCCAUCAAGUCCUCUC | 4464 | GAGAGGACUUGAUGGAGUU |
| siRNA 829 | 829 | ACUCCAUCAAGUCCUCUCU | 4465 | AGAGAGGACUUGAUGGAGU |
| siRNA 830 | 830 | CUCCAUCAAGUCCUCUCUG | 4466 | CAGAGAGGACUUGAUGGAG |
| siRNA 831 | 831 | UCCAUCAAGUCCUCUCUGG | 4467 | CCAGAGAGGACUUGAUGGA |
| siRNA 832 | 832 | CCAUCAAGUCCUCUCUGGG | 4468 | CCCAGAGAGGACUUGAUGG |
| siRNA 833 | 833 | CAUCAAGUCCUCUCUGGGC | 4469 | GCCCAGAGAGGACUUGAUG |
| siRNA 834 | 834 | AUCAAGUCCUCUCUGGGCG | 4470 | CGCCCAGAGAGGACUUGAU |
| siRNA 835 | 835 | UCAAGUCCUCUCUGGGCGG | 4471 | CCGCCCAGAGAGGACUUGA |
| siRNA 836 | 836 | CAAGUCCUCUCUGGGCGGG | 4472 | CCCGCCCAGAGAGGACUUG |
| siRNA 837 | 837 | AAGUCCUCUCUGGGCGGGG | 4473 | CCCCGCCCAGAGAGGACUU |
| siRNA 838 | 838 | AGUCCUCUCUGGGCGGGGA | 4474 | UCCCCGCCCAGAGAGGACU |
| siRNA 839 | 839 | GUCCUCUCUGGGCGGGGAG | 4475 | CUCCCCGCCCAGAGAGGAC |
| siRNA 840 | 840 | UCCUCUCUGGGCGGGGAGA | 4476 | UCUCCCCGCCCAGAGAGGA |
| siRNA 841 | 841 | CCUCUCUGGGGGGGGAGAC | 4477 | GUCUCCCCGCCCAGAGAGG |
| siRNA 842 | 842 | CUCUCUGGGCGGGGAGACG | 4478 | CGUCUCCCCGCCCAGAGAG |
| siRNA 843 | 843 | UCUCUGGGCGGGGAGACGC | 4479 | GCGUCUCCCCGCCCAGAGA |
| siRNA 844 | 844 | CUCUGGGCGGGGAGACGCC | 4480 | GGCGUCUCCCCGCCCAGAG |
| siRNA 845 | 845 | UCUGGGCGGGGAGACGCCU | 4481 | AGGCGUCUCCCCGCCCAGA |
| siRNA 846 | 846 | CUGGGCGGGGAGACGCCUG | 4482 | CAGGCGUCUCCCCGCCCAG |
| siRNA 847 | 847 | UGGGCGGGGAGACGCCUGG | 4483 | CCAGGCGUCUCCCCGCCCA |
| siRNA 848 | 848 | GGGGGGGAGACGCCUGGU | 4484 | ACCAGGCGUCUCCCCGCCC |
| siRNA 849 | 849 | GGCGGGGAGACGCCUGGUC | 4485 | GACCAGGCGUCUCCCCGCC |
| siRNA 850 | 850 | GCGGGGAGACGCCUGGUCA | 4486 | UGACCAGGCGUCUCCCCGC |
| siRNA 851 | 851 | CGGGGAGACGCCUGGUCAG | 4487 | CUGACCAGGCGUCUCCCCG |
| siRNA 852 | 852 | GGGGAGACGCCUGGUCAGG | 4488 | CCUGACCAGGCGUCUCCCC |
| siRNA 853 | 853 | GGGAGACGCCUGGUCAGGC | 4489 | GCCUGACCAGGCGUCUCCC |
| siRNA 854 | 854 | GGAGACGCCUGGUCAGGCC | 4490 | GGCCUGACCAGGCGUCUCC |
| siRNA 855 | 855 | GAGACGCCUGGUCAGGCCG | 4491 | CGGCCUGACCAGGCGUCUC |
| siRNA 856 | 856 | AGACGCCUGGUCAGGCCGC | 4492 | GCGGCCUGACCAGGCGUCU |
| siRNA 857 | 857 | GACGCCUGGUCAGGCCGCC | 4493 | GGCGGCCUGACCAGGCGUC |
| siRNA 858 | 858 | ACGCCUGGUCAGGCCGCCA | 4494 | UGGCGGCCUGACCAGGCGU |
| siRNA 859 | 859 | CGCCUGGUCAGGCCGCCAA | 4495 | UUGGCGGCCUGACCAGGCG |
| siRNA 860 | 860 | GCCUGGUCAGGCCGCCAAU | 4496 | AUUGGCGGCCUGACCAGGC |
| siRNA 861 | 861 | CCUGGUCAGGCCGCCAAUC | 4497 | GAUUGGCGGCCUGACCAGG |
| siRNA 862 | 862 | CUGGUCAGGCCGCCAAUCG | 4498 | CGAUUGGCGGCCUGACCAG |
| siRNA 863 | 863 | UGGUCAGGCCGCCAAUCGA | 4499 | UCGAUUGGCGGCCUGACCA |
| siRNA 864 | 864 | GGUCAGGCCGCCAAUCGAU | 4500 | AUCGAUUGGCGGCCUGACC |
| siRNA 865 | 865 | GUCAGGCCGCCAAUCGAUC | 4501 | GAUCGAUUGGCGGCCUGAC |
| siRNA 866 | 866 | UCAGGCCGCCAAUCGAUCU | 4502 | AGAUCGAUUGGCGGCCUGA |
| siRNA 867 | 867 | CAGGCCGCCAAUCGAUCUG | 4503 | CAGAUCGAUUGGCGGCCUG |
| siRNA 868 | 868 | AGGCCGCCAAUCGAUCUGC | 4504 | GCAGAUCGAUUGGCGGCCU |
| siRNA 869 | 869 | GGCCGCCAAUCGAUCUGCG | 4505 | CGCAGAUCGAUUGGCGGCC |
| siRNA 870 | 870 | GCCGCCAAUCGAUCUGCGG | 4506 | CCGCAGAUCGAUUGGCGGC |
| siRNA 871 | 871 | CCGCCAAUCGAUCUGCGGG | 4507 | CCCGCAGAUCGAUUGGCGG |
| siRNA 872 | 872 | CGCCAAUCGAUCUGCGGGC | 4508 | GCCCGCAGAUCGAUUGGCG |
| siRNA 873 | 873 | GCCAAUCGAUCUGCGGGCA | 4509 | UGCCCGCAGAUCGAUUGGC |
| siRNA 874 | 874 | CCAAUCGAUCUGCGGGCAU | 4510 | AUGCCCGCAGAUCGAUUGG |
| siRNA 875 | 875 | CAAUCGAUCUGCGGGCAUG | 4511 | CAUGCCCGCAGAUCGAUUG |
| siRNA 876 | 876 | AAUCGAUCUGCGGGCAUGU | 4512 | ACAUGCCCGCAGAUCGAUU |
| siRNA 877 | 877 | AUCGAUCUGCGGGCAUGUA | 4513 | UACAUGCCCGCAGAUCGAU |
| siRNA 878 | 878 | UCGAUCUGCGGGCAUGUAC | 4514 | GUACAUGCCCGCAGAUCGA |
| siRNA 879 | 879 | CGAUCUGCGGGCAUGUACC | 4515 | GGUACAUGCCCGCAGAUCG |
| siRNA 880 | 880 | GAUCUGCGGGCAUGUACCA | 4516 | UGGUACAUGCCCGCAGAUC |
| siRNA 881 | 881 | AUCUGCGGGCAUGUACCAA | 4517 | UUGGUACAUGCCCGCAGAU |
| siRNA 882 | 882 | UCUGCGGGCAUGUACCAAG | 4518 | CUUGGUACAUGCCCGCAGA |
| siRNA 883 | 883 | CUGCGGGCAUGUACCAAGG | 4519 | CCUUGGUACAUGCCCGCAG |
| siRNA 884 | 884 | UGCGGGCAUGUACCAAGGA | 4520 | UCCUUGGUACAUGCCCGCA |
| siRNA 885 | 885 | GCGGGCAUGUACCAAGGAC | 4521 | GUCCUUGGUACAUGCCCGC |
| siRNA 886 | 886 | CGGGCAUGUACCAAGGACU | 4522 | AGUCCUUGGUACAUGCCCG |
| siRNA 887 | 887 | GGGCAUGUACCAAGGACUG | 4523 | CAGUCCUUGGUACAUGCCC |
| siRNA 888 | 888 | GGCAUGUACCAAGGACUGG | 4524 | CCAGUCCUUGGUACAUGCC |
| siRNA 889 | 889 | GCAUGUACCAAGGACUGGC | 4525 | GCCAGUCCUUGGUACAUGC |
| siRNA 890 | 890 | CAUGUACCAAGGACUGGCA | 4526 | UGCCAGUCCUUGGUACAUG |
| siRNA 891 | 891 | AUGUACCAAGGACUGGCAU | 4527 | AUGCCAGUCCUUGGUACAU |
| siRNA 892 | 892 | UGUACCAAGGACUGGCAUU | 4528 | AAUGCCAGUCCUUGGUACA |
| siRNA 893 | 893 | GUACCAAGGACUGGCAUUC | 4529 | GAAUGCCAGUCCUUGGUAC |
| siRNA 894 | 894 | UACCAAGGACUGGCAUUCG | 4530 | CGAAUGCCAGUCCUUGGUA |
| siRNA 895 | 895 | ACCAAGGACUGGCAUUCGG | 4531 | CCGAAUGCCAGUCCUUGGU |
| siRNA 896 | 896 | CCAAGGACUGGCAUUCGGC | 4532 | GCCGAAUGCCAGUCCUUGG |
| siRNA 897 | 897 | CAAGGACUGGCAUUCGGCG | 4533 | CGCCGAAUGCCAGUCCUUG |
| siRNA 898 | 898 | AAGGACUGGCAUUCGGCGG | 4534 | CCGCCGAAUGCCAGUCCUU |
| siRNA 899 | 899 | AGGACUGGCAUUCGGCGGC | 4535 | GCCGCCGAAUGCCAGUCCU |
| siRNA 900 | 900 | GGACUGGCAUUCGGCGGCA | 4536 | UGCCGCCGAAUGCCAGUCC |
| siRNA 901 | 901 | GACUGGCAUUCGGCGGCAG | 4537 | CUGCCGCCGAAUGCCAGUC |
| siRNA 902 | 902 | ACUGGCAUUCGGCGGCAGU | 4538 | ACUGCCGCCGAAUGCCAGU |
| siRNA 903 | 903 | CUGGCAUUCGGCGGCAGUA | 4539 | UACUGCCGCCGAAUGCCAG |
| siRNA 904 | 904 | UGGCAUUCGGCGGCAGUAA | 4540 | UUACUGCCGCCGAAUGCCA |
| siRNA 905 | 905 | GGCAUUCGGCGGCAGUAAG | 4541 | CUUACUGCCGCCGAAUGCC |
| siRNA 906 | 906 | GCAUUCGGCGGCAGUAAGA | 4542 | UCUUACUGCCGCCGAAUGC |
| siRNA 907 | 907 | CAUUCGGCGGCAGUAAGAA | 4543 | UUCUUACUGCCGCCGAAUG |
| siRNA 908 | 908 | AUUCGGCGGCAGUAAGAAG | 4544 | CUUCUUACUGCCGCCGAAU |
| siRNA 909 | 909 | UUCGGCGGCAGUAAGAAGG | 4545 | CCUUCUUACUGCCGCCGAA |
| siRNA 910 | 910 | UCGGCGGCAGUAAGAAGGG | 4546 | CCCUUCUUACUGCCGCCGA |
| siRNA 911 | 911 | CGGCGGCAGUAAGAAGGGC | 4547 | GCCCUUCUUACUGCCGCCG |
| siRNA 912 | 912 | GGCGGCAGUAAGAAGGGCA | 4548 | UGCCCUUCUUACUGCCGCC |
| siRNA 913 | 913 | GCGGCAGUAAGAAGGGCAA | 4549 | UUGCCCUUCUUACUGCCGC |
| siRNA 914 | 914 | CGGCAGUAAGAAGGGCAAA | 4550 | UUUGCCCUUCUUACUGCCG |
| siRNA 915 | 915 | GGCAGUAAGAAGGGCAAAA | 4551 | UUUUGCCCUUCUUACUGCC |
| siRNA 916 | 916 | GCAGUAAGAAGGGCAAAAA | 4552 | UUUUUGCCCUUCUUACUGC |
| siRNA 917 | 917 | CAGUAAGAAGGGCAAAAAC | 4553 | GUUUUUGCCCUUCUUACUG |
| siRNA 918 | 918 | AGUAAGAAGGGCAAAAACC | 4554 | GGUUUUUGCCCUUCUUACU |
| siRNA 919 | 919 | GUAAGAAGGGCAAAAACCU | 4555 | AGGUUUUUGCCCUUCUUAC |
| siRNA 920 | 920 | UAAGAAGGGCAAAAACCUG | 4556 | CAGGUUUUUGCCCUUCUUA |
| siRNA 921 | 921 | AAGAAGGGCAAAAACCUGG | 4557 | CCAGGUUUUUGCCCUUCUU |
| siRNA 922 | 922 | AGAAGGGCAAAAACCUGGG | 4558 | CCCAGGUUUUUGCCCUUCU |
| siRNA 923 | 923 | GAAGGGCAAAAACCUGGGG | 4559 | CCCCAGGUUUUUGCCCUUC |
| siRNA 924 | 924 | AAGGGCAAAAACCUGGGGC | 4560 | GCCCCAGGUUUUUGCCCUU |
| siRNA 925 | 925 | AGGGCAAAAACCUGGGGCA | 4561 | UGCCCCAGGUUUUUGCCCU |
| siRNA 926 | 926 | GGGCAAAAACCUGGGGCAG | 4562 | CUGCCCCAGGUUUUUGCCC |
| siRNA 927 | 927 | GGCAAAAACCUGGGGCAGG | 4563 | CCUGCCCCAGGUUUUUGCC |
| siRNA 928 | 928 | GCAAAAACCUGGGGCAGGC | 4564 | GCCUGCCCCAGGUUUUUGC |
| siRNA 929 | 929 | CAAAAACCUGGGGCAGGCC | 4565 | GGCCUGCCCCAGGUUUUUG |
| siRNA 930 | 930 | AAAAACCUGGGGCAGGCCU | 4566 | AGGCCUGCCCCAGGUUUUU |
| siRNA 931 | 931 | AAAACCUGGGGCAGGCCUA | 4567 | UAGGCCUGCCCCAGGUUUU |
| siRNA 932 | 932 | AAACCUGGGGCAGGCCUAC | 4568 | GUAGGCCUGCCCCAGGUUU |
| siRNA 933 | 933 | AACCUGGGGCAGGCCUACC | 4569 | GGUAGGCCUGCCCCAGGUU |
| siRNA 934 | 934 | ACCUGGGGCAGGCCUACCC | 4570 | GGGUAGGCCUGCCCCAGGU |
| siRNA 935 | 935 | CCUGGGGCAGGCCUACCCU | 4571 | AGGGUAGGCCUGCCCCAGG |
| siRNA 936 | 936 | CUGGGGCAGGCCUACCCUU | 4572 | AAGGGUAGGCCUGCCCCAG |
| siRNA 937 | 937 | UGGGGCAGGCCUACCCUUG | 4573 | CAAGGGUAGGCCUGCCCCA |
| siRNA 938 | 938 | GGGGCAGGCCUACCCUUGU | 4574 | ACAAGGGUAGGCCUGCCCC |
| siRNA 939 | 939 | GGGCAGGCCUACCCUUGUA | 4575 | UACAAGGGUAGGCCUGCCC |
| siRNA 940 | 940 | GGCAGGCCUACCCUUGUAG | 4576 | CUACAAGGGUAGGCCUGCC |
| siRNA 941 | 941 | GCAGGCCUACCCUUGUAGC | 4577 | GCUACAAGGGUAGGCCUGC |
| siRNA 942 | 942 | CAGGCCUACCCUUGUAGCA | 4578 | UGCUACAAGGGUAGGCCUG |
| siRNA 943 | 943 | AGGCCUACCCUUGUAGCAG | 4579 | CUGCUACAAGGGUAGGCCU |
| siRNA 944 | 944 | GGCCUACCCUUGUAGCAGU | 4580 | ACUGCUACAAGGGUAGGCC |
| siRNA 945 | 945 | GCCUACCCUUGUAGCAGUG | 4581 | CACUGCUACAAGGGUAGGC |
| siRNA 946 | 946 | CCUACCCUUGUAGCAGUGA | 4582 | UCACUGCUACAAGGGUAGG |
| siRNA 947 | 947 | CUACCCUUGUAGCAGUGAU | 4583 | AUCACUGCUACAAGGGUAG |
| siRNA 948 | 948 | UACCCUUGUAGCAGUGAUA | 4584 | UAUCACUGCUACAAGGGUA |
| siRNA 949 | 949 | ACCCUUGUAGCAGUGAUAA | 4585 | UUAUCACUGCUACAAGGGU |
| siRNA 950 | 950 | CCCUUGUAGCAGUGAUAAG | 4586 | CUUAUCACUGCUACAAGGG |
| siRNA 951 | 951 | CCUUGUAGCAGUGAUAAGG | 4587 | CCUUAUCACUGCUACAAGG |
| siRNA 952 | 952 | CUUGUAGCAGUGAUAAGGA | 4588 | UCCUUAUCACUGCUACAAG |
| siRNA 953 | 953 | UUGUAGCAGUGAUAAGGAG | 4589 | CUCCUUAUCACUGCUACAA |
| siRNA 954 | 954 | UGUAGCAGUGAUAAGGAGU | 4590 | ACUCCUUAUCACUGCUACA |
| siRNA 955 | 955 | GUAGCAGUGAUAAGGAGUG | 4591 | CACUCCUUAUCACUGCUAC |
| siRNA 956 | 956 | UAGCAGUGAUAAGGAGUGU | 4592 | ACACUCCUUAUCACUGCUA |
| siRNA 957 | 957 | AGCAGUGAUAAGGAGUGUG | 4593 | CACACUCCUUAUCACUGCU |
| siRNA 958 | 958 | GCAGUGAUAAGGAGUGUGA | 4594 | UCACACUCCUUAUCACUGC |
| siRNA 959 | 959 | CAGUGAUAAGGAGUGUGAA | 4595 | UUCACACUCCUUAUCACUG |
| siRNA 960 | 960 | AGUGAUAAGGAGUGUGAAG | 4596 | CUUCACACUCCUUAUCACU |
| siRNA 961 | 961 | GUGAUAAGGAGUGUGAAGU | 4597 | ACUUCACACUCCUUAUCAC |
| siRNA 962 | 962 | UGAUAAGGAGUGUGAAGUU | 4598 | AACUUCACACUCCUUAUCA |
| siRNA 963 | 963 | GAUAAGGAGUGUGAAGUUG | 4599 | CAACUUCACACUCCUUAUC |
| siRNA 964 | 964 | AUAAGGAGUGUGAAGUUGG | 4600 | CCAACUUCACACUCCUUAU |
| siRNA 965 | 965 | UAAGGAGUGUGAAGUUGGG | 4601 | CCCAACUUCACACUCCUUA |
| siRNA 966 | 966 | AAGGAGUGUGAAGUUGGGA | 4602 | UCCCAACUUCACACUCCUU |
| siRNA 967 | 967 | AGGAGUGUGAAGUUGGGAG | 4603 | CUCCCAACUUCACACUCCU |
| siRNA 968 | 968 | GGAGUGUGAAGUUGGGAGG | 4604 | CCUCCCAACUUCACACUCC |
| siRNA 969 | 969 | GAGUGUGAAGUUGGGAGGU | 4605 | ACCUCCCAACUUCACACUC |
| siRNA 970 | 970 | AGUGUGAAGUUGGGAGGUA | 4606 | UACCUCCCAACUUCACACU |
| siRNA 971 | 971 | GUGUGAAGUUGGGAGGUAU | 4607 | AUACCUCCCAACUUCACAC |
| siRNA 972 | 972 | UGUGAAGUUGGGAGGUAUU | 4608 | AAUACCUCCCAACUUCACA |
| siRNA 973 | 973 | GUGAAGUUGGGAGGUAUUG | 4609 | CAAUACCUCCCAACUUCAC |
| siRNA 974 | 974 | UGAAGUUGGGAGGUAUUGC | 4610 | GCAAUACCUCCCAACUUCA |
| siRNA 975 | 975 | GAAGUUGGGAGGUAUUGCC | 4611 | GGCAAUACCUCCCAACUUC |
| siRNA 976 | 976 | AAGUUGGGAGGUAUUGCCA | 4612 | UGGCAAUACCUCCCAACUU |
| siRNA 977 | 977 | AGUUGGGAGGUAUUGCCAC | 4613 | GUGGCAAUACCUCCCAACU |
| siRNA 978 | 978 | GUUGGGAGGUAUUGCCACA | 4614 | UGUGGCAAUACCUCCCAAC |
| siRNA 979 | 979 | UUGGGAGGUAUUGCCACAG | 4615 | CUGUGGCAAUACCUCCCAA |
| siRNA 980 | 980 | UGGGAGGUAUUGCCACAGU | 4616 | ACUGUGGCAAUACCUCCCA |
| siRNA 981 | 981 | GGGAGGUAUUGCCACAGUC | 4617 | GACUGUGGCAAUACCUCCC |
| siRNA 982 | 982 | GGAGGUAUUGCCACAGUCC | 4618 | GGACUGUGGCAAUACCUCC |
| siRNA 983 | 983 | GAGGUAUUGCCACAGUCCC | 4619 | GGGACUGUGGCAAUACCUC |
| siRNA 984 | 984 | AGGUAUUGCCACAGUCCCC | 4620 | GGGGACUGUGGCAAUACCU |
| siRNA 985 | 985 | GGUAUUGCCACAGUCCCCA | 4621 | UGGGGACUGUGGCAAUACC |
| siRNA 986 | 986 | GUAUUGCCACAGUCCCCAC | 4622 | GUGGGGACUGUGGCAAUAC |
| siRNA 987 | 987 | UAUUGCCACAGUCCCCACC | 4623 | GGUGGGGACUGUGGCAAUA |
| siRNA 988 | 988 | AUUGCCACAGUCCCCACCA | 4624 | UGGUGGGGACUGUGGCAAU |
| siRNA 989 | 989 | UUGCCACAGUCCCCACCAA | 4625 | UUGGUGGGGACUGUGGCAA |
| siRNA 990 | 990 | UGCCACAGUCCCCACCAAG | 4626 | CUUGGUGGGGACUGUGGCA |
| siRNA 991 | 991 | GCCACAGUCCCCACCAAGG | 4627 | CCUUGGUGGGGACUGUGGC |
| siRNA 992 | 992 | CCACAGUCCCCACCAAGGA | 4628 | UCCUUGGUGGGGACUGUGG |
| siRNA 993 | 993 | CACAGUCCCCACCAAGGAU | 4629 | AUCCUUGGUGGGGACUGUG |
| siRNA 994 | 994 | ACAGUCCCCACCAAGGAUC | 4630 | GAUCCUUGGUGGGGACUGU |
| siRNA 995 | 995 | CAGUCCCCACCAAGGAUCA | 4631 | UGAUCCUUGGUGGGGACUG |
| siRNA 996 | 996 | AGUCCCCACCAAGGAUCAU | 4632 | AUGAUCCUUGGUGGGGACU |
| siRNA 997 | 997 | GUCCCCACCAAGGAUCAUC | 4633 | GAUGAUCCUUGGUGGGGAC |
| siRNA 998 | 998 | UCCCCACCAAGGAUCAUCG | 4634 | CGAUGAUCCUUGGUGGGGA |
| siRNA 999 | 999 | CCCCACCAAGGAUCAUCGG | 4635 | CCGAUGAUCCUUGGUGGGG |
| siRNA 1000 | 1000 | CCCACCAAGGAUCAUCGGC | 4636 | GCCGAUGAUCCUUGGUGGG |
| siRNA 1001 | 1001 | CCACCAAGGAUCAUCGGCC | 4637 | GGCCGAUGAUCCUUGGUGG |
| siRNA 1002 | 1002 | CACCAAGGAUCAUCGGCCU | 4638 | AGGCCGAUGAUCCUUGGUG |
| siRNA 1003 | 1003 | ACCAAGGAUCAUCGGCCUG | 4639 | CAGGCCGAUGAUCCUUGGU |
| siRNA 1004 | 1004 | CCAAGGAUCAUCGGCCUGC | 4640 | GCAGGCCGAUGAUCCUUGG |
| siRNA 1005 | 1005 | CAAGGAUCAUCGGCCUGCA | 4641 | UGCAGGCCGAUGAUCCUUG |
| siRNA 1006 | 1006 | AAGGAUCAUCGGCCUGCAU | 4642 | AUGCAGGCCGAUGAUCCUU |
| siRNA 1007 | 1007 | AGGAUCAUCGGCCUGCAUG | 4643 | CAUGCAGGCCGAUGAUCCU |
| siRNA 1008 | 1008 | GGAUCAUCGGCCUGCAUGG | 4644 | CCAUGCAGGCCGAUGAUCC |
| siRNA 1009 | 1009 | GAUCAUCGGCCUGCAUGGU | 4645 | ACCAUGCAGGCCGAUGAUC |
| siRNA 1010 | 1010 | AUCAUCGGCCUGCAUGGUG | 4646 | CACCAUGCAGGCCGAUGAU |
| siRNA 1011 | 1011 | UCAUCGGCCUGCAUGGUGU | 4647 | ACACCAUGCAGGCCGAUGA |
| siRNA 1012 | 1012 | CAUCGGCCUGCAUGGUGUG | 4648 | CACACCAUGCAGGCCGAUG |
| siRNA 1013 | 1013 | AUCGGCCUGCAUGGUGUGU | 4649 | ACACACCAUGCAGGCCGAU |
| siRNA 1014 | 1014 | UCGGCCUGCAUGGUGUGUC | 4650 | GACACACCAUGCAGGCCGA |
| siRNA 1015 | 1015 | CGGCCUGCAUGGUGUGUCG | 4651 | CGACACACCAUGCAGGCCG |
| siRNA 1016 | 1016 | GGCCUGCAUGGUGUGUCGG | 4652 | CCGACACACCAUGCAGGCC |
| siRNA 1017 | 1017 | GCCUGCAUGGUGUGUCGGA | 4653 | UCCGACACACCAUGCAGGC |
| siRNA 1018 | 1018 | CCUGCAUGGUGUGUCGGAG | 4654 | CUCCGACACACCAUGCAGG |
| siRNA 1019 | 1019 | CUGCAUGGUGUGUCGGAGA | 4655 | UCUCCGACACACCAUGCAG |
| siRNA 1020 | 1020 | UGCAUGGUGUGUCGGAGAA | 4656 | UUCUCCGACACACCAUGCA |
| siRNA 1021 | 1021 | GCAUGGUGUGUCGGAGAAA | 4657 | UUUCUCCGACACACCAUGC |
| siRNA 1022 | 1022 | CAUGGUGUGUCGGAGAAAA | 4658 | UUUUCUCCGACACACCAUG |
| siRNA 1023 | 1023 | AUGGUGUGUCGGAGAAAAA | 4659 | UUUUUCUCCGACACACCAU |
| siRNA 1024 | 1024 | UGGUGUGUCGGAGAAAAAA | 4660 | UUUUUUCUCCGACACACCA |
| siRNA 1025 | 1025 | GGUGUGUCGGAGAAAAAAG | 4661 | CUUUUUUCUCCGACACACC |
| siRNA 1026 | 1026 | GUGUGUCGGAGAAAAAAGA | 4662 | UCUUUUUUCUCCGACACAC |
| siRNA 1027 | 1027 | UGUGUCGGAGAAAAAAGAA | 4663 | UUCUUUUUUCUCCGACACA |
| siRNA 1028 | 1028 | GUGUCGGAGAAAAAAGAAG | 4664 | CUUCUUUUUUCUCCGACAC |
| siRNA 1029 | 1029 | UGUCGGAGAAAAAAGAAGC | 4665 | GCUUCUUUUUUCUCCGACA |
| siRNA 1030 | 1030 | GUCGGAGAAAAAAGAAGCG | 4666 | CGCUUCUUUUUUCUCCGAC |
| siRNA 1031 | 1031 | UCGGAGAAAAAAGAAGCGC | 4667 | GCGCUUCUUUUUUCUCCGA |
| siRNA 1032 | 1032 | CGGAGAAAAAAGAAGCGCU | 4668 | AGCGCUUCUUUUUUCUCCG |
| siRNA 1033 | 1033 | GGAGAAAAAAGAAGCGCUG | 4669 | CAGCGCUUCUUUUUUCUCC |
| siRNA 1034 | 1034 | GAGAAAAAAGAAGCGCUGC | 4670 | GCAGCGCUUCUUUUUUCUC |
| siRNA 1035 | 1035 | AGAAAAAAGAAGCGCUGCC | 4671 | GGCAGCGCUUCUUUUUUCU |
| siRNA 1036 | 1036 | GAAAAAAGAAGCGCUGCCA | 4672 | UGGCAGCGCUUCUUUUUUC |
| siRNA 1037 | 1037 | AAAAAAGAAGCGCUGCCAC | 4673 | GUGGCAGCGCUUUUUUUU |
| siRNA 1038 | 1038 | AAAAAGAAGCGCUGCCACC | 4674 | GGUGGCAGCGCUUCUUUUU |
| siRNA 1039 | 1039 | AAAAGAAGCGCUGCCACCG | 4675 | CGGUGGCAGCGCUUCUUUU |
| siRNA 1040 | 1040 | AAAGAAGCGCUGCCACCGA | 4676 | UCGGUGGCAGCGCUUCUUU |
| siRNA 1041 | 1041 | AAGAAGCGCUGCCACCGAG | 4677 | CUCGGUGGCAGCGCUUCUU |
| siRNA 1042 | 1042 | AGAAGCGCUGCCACCGAGA | 4678 | UCUCGGUGGCAGCGCUUCU |
| siRNA 1043 | 1043 | GAAGCGCUGCCACCGAGAU | 4679 | AUCUCGGUGGCAGCGCUUC |
| siRNA 1044 | 1044 | AAGCGCUGCCACCGAGAUG | 4680 | CAUCUCGGUGGCAGCGCUU |
| siRNA 1045 | 1045 | AGCGCUGCCACCGAGAUGG | 4681 | CCAUCUCGGUGGCAGCGCU |
| siRNA 1046 | 1046 | GCGCUGCCACCGAGAUGGC | 4682 | GCCAUCUCGGUGGCAGCGC |
| siRNA 1047 | 1047 | CGCUGCCACCGAGAUGGCA | 4683 | UGCCAUCUCGGUGGCAGCG |
| siRNA 1048 | 1048 | GCUGCCACCGAGAUGGCAU | 4684 | AUGCCAUCUCGGUGGCAGC |
| siRNA 1049 | 1049 | CUGCCACCGAGAUGGCAUG | 4685 | CAUGCCAUCUCGGUGGCAG |
| siRNA 1050 | 1050 | UGCCACCGAGAUGGCAUGU | 4686 | ACAUGCCAUCUCGGUGGCA |
| siRNA 1051 | 1051 | GCCACCGAGAUGGCAUGUG | 4687 | CACAUGCCAUCUCGGUGGC |
| siRNA 1052 | 1052 | CCACCGAGAUGGCAUGUGC | 4688 | GCACAUGCCAUCUCGGUGG |
| siRNA 1053 | 1053 | CACCGAGAUGGCAUGUGCU | 4689 | AGCACAUGCCAUCUCGGUG |
| siRNA 1054 | 1054 | ACCGAGAUGGCAUGUGCUG | 4690 | CAGCACAUGCCAUCUCGGU |
| siRNA 1055 | 1055 | CCGAGAUGGCAUGUGCUGC | 4691 | GCAGCACAUGCCAUCUCGG |
| siRNA 1056 | 1056 | CGAGAUGGCAUGUGCUGCC | 4692 | GGCAGCACAUGCCAUCUCG |
| siRNA 1057 | 1057 | GAGAUGGCAUGUGCUGCCC | 4693 | GGGCAGCACAUGCCAUCUC |
| siRNA 1058 | 1058 | AGAUGGCAUGUGCUGCCCC | 4694 | GGGGCAGCACAUGCCAUCU |
| siRNA 1059 | 1059 | GAUGGCAUGUGCUGCCCCA | 4695 | UGGGGCAGCACAUGCCAUC |
| siRNA 1060 | 1060 | AUGGCAUGUGCUGCCCCAG | 4696 | CUGGGGCAGCACAUGCCAU |
| siRNA 1061 | 1061 | UGGCAUGUGCUGCCCCAGU | 4697 | ACUGGGGCAGCACAUGCCA |
| siRNA 1062 | 1062 | GGCAUGUGCUGCCCCAGUA | 4698 | UACUGGGGCAGCACAUGCC |
| siRNA 1063 | 1063 | GCAUGUGCUGCCCCAGUAC | 4699 | GUACUGGGGCAGCACAUGC |
| siRNA 1064 | 1064 | CAUGUGCUGCCCCAGUACC | 4700 | GGUACUGGGGCAGCACAUG |
| siRNA 1065 | 1065 | AUGUGCUGCCCCAGUACCC | 4701 | GGGUACUGGGGCAGCACAU |
| siRNA 1066 | 1066 | UGUGCUGCCCCAGUACCCG | 4702 | CGGGUACUGGGGCAGCACA |
| siRNA 1067 | 1067 | GUGCUGCCCCAGUACCCGC | 4703 | GCGGGUACUGGGGCAGCAC |
| siRNA 1068 | 1068 | UGCUGCCCCAGUACCCGCU | 4704 | AGCGGGUACUGGGGCAGCA |
| siRNA 1069 | 1069 | GCUGCCCCAGUACCCGCUG | 4705 | CAGCGGGUACUGGGGCAGC |
| siRNA 1070 | 1070 | CUGCCCCAGUACCCGCUGC | 4706 | GCAGCGGGUACUGGGGCAG |
| siRNA 1071 | 1071 | UGCCCCAGUACCCGCUGCA | 4707 | UGCAGCGGGUACUGGGGCA |
| siRNA 1072 | 1072 | GCCCCAGUACCCGCUGCAA | 4708 | UUGCAGCGGGUACUGGGGC |
| siRNA 1073 | 1073 | CCCCAGUACCCGCUGCAAU | 4709 | AUUGCAGCGGGUACUGGGG |
| siRNA 1074 | 1074 | CCCAGUACCCGCUGCAAUA | 4710 | UAUUGCAGCGGGUACUGGG |
| siRNA 1075 | 1075 | CCAGUACCCGCUGCAAUAA | 4711 | UUAUUGCAGCGGGUACUGG |
| siRNA 1076 | 1076 | CAGUACCCGCUGCAAUAAU | 4712 | AUUAUUGCAGCGGGUACUG |
| siRNA 1077 | 1077 | AGUACCCGCUGCAAUAAUG | 4713 | CAUUAUUGCAGCGGGUACU |
| siRNA 1078 | 1078 | GUACCCGCUGCAAUAAUGG | 4714 | CCAUUAUUGCAGCGGGUAC |
| siRNA 1079 | 1079 | UACCCGCUGCAAUAAUGGC | 4715 | GCCAUUAUUGCAGCGGGUA |
| siRNA 1080 | 1080 | ACCCGCUGCAAUAAUGGCA | 4716 | UGCCAUUAUUGCAGCGGGU |
| siRNA 1081 | 1081 | CCCGCUGCAAUAAUGGCAU | 4717 | AUGCCAUUAUUGCAGCGGG |
| siRNA 1082 | 1082 | CCGCUGCAAUAAUGGCAUC | 4718 | GAUGCCAUUAUUGCAGCGG |
| siRNA 1083 | 1083 | CGCUGCAAUAAUGGCAUCU | 4719 | AGAUGCCAUUAUUGCAGCG |
| siRNA 1084 | 1084 | GCUGCAAUAAUGGCAUCUG | 4720 | CAGAUGCCAUUAUUGCAGC |
| siRNA 1085 | 1085 | CUGCAAUAAUGGCAUCUGU | 4721 | ACAGAUGCCAUUAUUGCAG |
| siRNA 1086 | 1086 | UGCAAUAAUGGCAUCUGUA | 4722 | UACAGAUGCCAUUAUUGCA |
| siRNA 1087 | 1087 | GCAAUAAUGGCAUCUGUAU | 4723 | AUACAGAUGCCAUUAUUGC |
| siRNA 1088 | 1088 | CAAUAAUGGCAUCUGUAUC | 4724 | GAUACAGAUGCCAUUAUUG |
| siRNA 1089 | 1089 | AAUAAUGGCAUCUGUAUCC | 4725 | GGAUACAGAUGCCAUUAUU |
| siRNA 1090 | 1090 | AUAAUGGCAUCUGUAUCCC | 4726 | GGGAUACAGAUGCCAUUAU |
| siRNA 1091 | 1091 | UAAUGGCAUCUGUAUCCCA | 4727 | UGGGAUACAGAUGCCAUUA |
| siRNA 1092 | 1092 | AAUGGCAUCUGUAUCCCAG | 4728 | CUGGGAUACAGAUGCCAUU |
| siRNA 1093 | 1093 | AUGGCAUCUGUAUCCCAGU | 4729 | ACUGGGAUACAGAUGCCAU |
| siRNA 1094 | 1094 | UGGCAUCUGUAUCCCAGUU | 4730 | AACUGGGAUACAGAUGCCA |
| siRNA 1095 | 1095 | GGCAUCUGUAUCCCAGUUA | 4731 | UAACUGGGAUACAGAUGCC |
| siRNA 1096 | 1096 | GCAUCUGUAUCCCAGUUAC | 4732 | GUAACUGGGAUACAGAUGC |
| siRNA 1097 | 1097 | CAUCUGUAUCCCAGUUACU | 4733 | AGUAACUGGGAUACAGAUG |
| siRNA 1098 | 1098 | AUCUGUAUCCCAGUUACUG | 4734 | CAGUAACUGGGAUACAGAU |
| siRNA 1099 | 1099 | UCUGUAUCCCAGUUACUGA | 4735 | UCAGUAACUGGGAUACAGA |
| siRNA 1100 | 1100 | CUGUAUCCCAGUUACUGAA | 4736 | UUCAGUAACUGGGAUACAG |
| siRNA 1101 | 1101 | UGUAUCCCAGUUACUGAAA | 4737 | UUUCAGUAACUGGGAUACA |
| siRNA 1102 | 1102 | GUAUCCCAGUUACUGAAAG | 4738 | CUUUCAGUAACUGGGAUAC |
| siRNA 1103 | 1103 | UAUCCCAGUUACUGAAAGC | 4739 | GCUUUCAGUAACUGGGAUA |
| siRNA 1104 | 1104 | AUCCCAGUUACUGAAAGCA | 4740 | UGCUUUCAGUAACUGGGAU |
| siRNA 1105 | 1105 | UCCCAGUUACUGAAAGCAU | 4741 | AUGCUUUCAGUAACUGGGA |
| siRNA 1106 | 1106 | CCCAGUUACUGAAAGCAUC | 4742 | GAUGCUUUCAGUAACUGGG |
| siRNA 1107 | 1107 | CCAGUUACUGAAAGCAUCU | 4743 | AGAUGCUUUCAGUAACUGG |
| siRNA 1108 | 1108 | CAGUUACUGAAAGCAUCUU | 4744 | AAGAUGCUUUCAGUAACUG |
| siRNA 1109 | 1109 | AGUUACUGAAAGCAUCUUA | 4745 | UAAGAUGCUUUCAGUAACU |
| siRNA 1110 | 1110 | GUUACUGAAAGCAUCUUAA | 4746 | UUAAGAUGCUUUCAGUAAC |
| siRNA 1111 | 1111 | UUACUGAAAGCAUCUUAAC | 4747 | GUUAAGAUGCUUUCAGUAA |
| siRNA 1112 | 1112 | UACUGAAAGCAUCUUAACC | 4748 | GGUUAAGAUGCUUUCAGUA |
| siRNA 1113 | 1113 | ACUGAAAGCAUCUUAACCC | 4749 | GGGUUAAGAUGCUUUCAGU |
| siRNA 1114 | 1114 | CUGAAAGCAUCUUAACCCC | 4750 | GGGGUUAAGAUGCUUUCAG |
| siRNA 1115 | 1115 | UGAAAGCAUCUUAACCCCU | 4751 | AGGGGUUAAGAUGCUUUCA |
| siRNA 1116 | 1116 | GAAAGCAUCUUAACCCCUC | 4752 | GAGGGGUUAAGAUGCUUUC |
| siRNA 1117 | 1117 | AAAGCAUCUUAACCCCUCA | 4753 | UGAGGGGUUAAGAUGCUUU |
| siRNA 1118 | 1118 | AAGCAUCUUAACCCCUCAC | 4754 | GUGAGGGGUUAAGAUGCUU |
| siRNA 1119 | 1119 | AGCAUCUUAACCCCUCACA | 4755 | UGUGAGGGGUUAAGAUGCU |
| siRNA 1120 | 1120 | GCAUCUUAACCCCUCACAU | 4756 | AUGUGAGGGGUUAAGAUGC |
| siRNA 1121 | 1121 | CAUCUUAACCCCUCACAUC | 4757 | GAUGUGAGGGGUUAAGAUG |
| siRNA 1122 | 1122 | AUCUUAACCCCUCACAUCC | 4758 | GGAUGUGAGGGGUUAAGAU |
| siRNA 1123 | 1123 | UCUUAACCCCUCACAUCCC | 4759 | GGGAUGUGAGGGGUUAAGA |
| siRNA 1124 | 1124 | CUUAACCCCUCACAUCCCG | 4760 | CGGGAUGUGAGGGGUUAAG |
| siRNA 1125 | 1125 | UUAACCCCUCACAUCCCGG | 4761 | CCGGGAUGUGAGGGGUUAA |
| siRNA 1126 | 1126 | UAACCCCUCACAUCCCGGC | 4762 | GCCGGGAUGUGAGGGGUUA |
| siRNA 1127 | 1127 | AACCCCUCACAUCCCGGCU | 4763 | AGCCGGGAUGUGAGGGGUU |
| siRNA 1128 | 1128 | ACCCCUCACAUCCCGGCUC | 4764 | GAGCCGGGAUGUGAGGGGU |
| siRNA 1129 | 1129 | CCCCUCACAUCCCGGCUCU | 4765 | AGAGCCGGGAUGUGAGGGG |
| siRNA 1130 | 1130 | CCCUCACAUCCCGGCUCUG | 4766 | CAGAGCCGGGAUGUGAGGG |
| siRNA 1131 | 1131 | CCUCACAUCCCGGCUCUGG | 4767 | CCAGAGCCGGGAUGUGAGG |
| siRNA 1132 | 1132 | CUCACAUCCCGGCUCUGGA | 4768 | UCCAGAGCCGGGAUGUGAG |
| siRNA 1133 | 1133 | UCACAUCCCGGCUCUGGAU | 4769 | AUCCAGAGCCGGGAUGUGA |
| siRNA 1134 | 1134 | CACAUCCCGGCUCUGGAUG | 4770 | CAUCCAGAGCCGGGAUGUG |
| siRNA 1135 | 1135 | ACAUCCCGGCUCUGGAUGG | 4771 | CCAUCCAGAGCCGGGAUGU |
| siRNA 1136 | 1136 | CAUCCCGGCUCUGGAUGGU | 4772 | ACCAUCCAGAGCCGGGAUG |
| siRNA 1137 | 1137 | AUCCCGGCUCUGGAUGGUA | 4773 | UACCAUCCAGAGCCGGGAU |
| siRNA 1138 | 1138 | UCCCGGCUCUGGAUGGUAC | 4774 | GUACCAUCCAGAGCCGGGA |
| siRNA 1139 | 1139 | CCCGGCUCUGGAUGGUACU | 4775 | AGUACCAUCCAGAGCCGGG |
| siRNA 1140 | 1140 | CCGGCUCUGGAUGGUACUC | 4776 | GAGUACCAUCCAGAGCCGG |
| siRNA 1141 | 1141 | CGGCUCUGGAUGGUACUCG | 4777 | CGAGUACCAUCCAGAGCCG |
| siRNA 1142 | 1142 | GGCUCUGGAUGGUACUCGG | 4778 | CCGAGUACCAUCCAGAGCC |
| siRNA 1143 | 1143 | GCUCUGGAUGGUACUCGGC | 4779 | GCCGAGUACCAUCCAGAGC |
| siRNA 1144 | 1144 | CUCUGGAUGGUACUCGGCA | 4780 | UGCCGAGUACCAUCCAGAG |
| siRNA 1145 | 1145 | UCUGGAUGGUACUCGGCAC | 4781 | GUGCCGAGUACCAUCCAGA |
| siRNA 1146 | 1146 | CUGGAUGGUACUCGGCACA | 4782 | UGUGCCGAGUACCAUCCAG |
| siRNA 1147 | 1147 | UGGAUGGUACUCGGCACAG | 4783 | CUGUGCCGAGUACCAUCCA |
| siRNA 1148 | 1148 | GGAUGGUACUCGGCACAGA | 4784 | UCUGUGCCGAGUACCAUCC |
| siRNA 1149 | 1149 | GAUGGUACUCGGCACAGAG | 4785 | CUCUGUGCCGAGUACCAUC |
| siRNA 1150 | 1150 | AUGGUACUCGGCACAGAGA | 4786 | UCUCUGUGCCGAGUACCAU |
| siRNA 1151 | 1151 | UGGUACUCGGCACAGAGAU | 4787 | AUCUCUGUGCCGAGUACCA |
| siRNA 1152 | 1152 | GGUACUCGGCACAGAGAUC | 4788 | GAUCUCUGUGCCGAGUACC |
| siRNA 1153 | 1153 | GUACUCGGCACAGAGAUCG | 4789 | CGAUCUCUGUGCCGAGUAC |
| siRNA 1154 | 1154 | UACUCGGCACAGAGAUCGA | 4790 | UCGAUCUCUGUGCCGAGUA |
| siRNA 1155 | 1155 | ACUCGGCACAGAGAUCGAA | 4791 | UUCGAUCUCUGUGCCGAGU |
| siRNA 1156 | 1156 | CUCGGCACAGAGAUCGAAA | 4792 | UUUCGAUCUCUGUGCCGAG |
| siRNA 1157 | 1157 | UCGGCACAGAGAUCGAAAC | 4793 | GUUUCGAUCUCUGUGCCGA |
| siRNA 1158 | 1158 | CGGCACAGAGAUCGAAACC | 4794 | GGUUUCGAUCUCUGUGCCG |
| siRNA 1159 | 1159 | GGCACAGAGAUCGAAACCA | 4795 | UGGUUUCGAUCUCUGUGCC |
| siRNA 1160 | 1160 | GCACAGAGAUCGAAACCAC | 4796 | GUGGUUUCGAUCUCUGUGC |
| siRNA 1161 | 1161 | CACAGAGAUCGAAACCACG | 4797 | CGUGGUUUCGAUCUCUGUG |
| siRNA 1162 | 1162 | ACAGAGAUCGAAACCACGG | 4798 | CCGUGGUUUCGAUCUCUGU |
| siRNA 1163 | 1163 | CAGAGAUCGAAACCACGGU | 4799 | ACCGUGGUUUCGAUCUCUG |
| siRNA 1164 | 1164 | AGAGAUCGAAACCACGGUC | 4800 | GACCGUGGUUUCGAUCUCU |
| siRNA 1165 | 1165 | GAGAUCGAAACCACGGUCA | 4801 | UGACCGUGGUUUCGAUCUC |
| siRNA 1166 | 1166 | AGAUCGAAACCACGGUCAU | 4802 | AUGACCGUGGUUUCGAUCU |
| siRNA 1167 | 1167 | GAUCGAAACCACGGUCAUU | 4803 | AAUGACCGUGGUUUCGAUC |
| siRNA 1168 | 1168 | AUCGAAACCACGGUCAUUA | 4804 | UAAUGACCGUGGUUUCGAU |
| siRNA 1169 | 1169 | UCGAAACCACGGUCAUUAC | 4805 | GUAAUGACCGUGGUUUCGA |
| siRNA 1170 | 1170 | CGAAACCACGGUCAUUACU | 4806 | AGUAAUGACCGUGGUUUCG |
| siRNA 1171 | 1171 | GAAACCACGGUCAUUACUC | 4807 | GAGUAAUGACCGUGGUUUC |
| siRNA 1172 | 1172 | AAACCACGGUCAUUACUCA | 4808 | UGAGUAAUGACCGUGGUUU |
| siRNA 1173 | 1173 | AACCACGGUCAUUACUCAA | 4809 | UUGAGUAAUGACCGUGGUU |
| siRNA 1174 | 1174 | ACCACGGUCAUUACUCAAA | 4810 | UUUGAGUAAUGACCGUGGU |
| siRNA 1175 | 1175 | CCACGGUCAUUACUCAAAC | 4811 | GUUUGAGUAAUGACCGUGG |
| siRNA 1176 | 1176 | CACGGUCAUUACUCAAACC | 4812 | GGUUUGAGUAAUGACCGUG |
| siRNA 1177 | 1177 | ACGGUCAUUACUCAAACCA | 4813 | UGGUUUGAGUAAUGACCGU |
| siRNA 1178 | 1178 | CGGUCAUUACUCAAACCAU | 4814 | AUGGUUUGAGUAAUGACCG |
| siRNA 1179 | 1179 | GGUCAUUACUCAAACCAUG | 4815 | CAUGGUUUGAGUAAUGACC |
| siRNA 1180 | 1180 | GUCAUUACUCAAACCAUGA | 4816 | UCAUGGUUUGAGUAAUGAC |
| siRNA 1181 | 1181 | UCAUUACUCAAACCAUGAC | 4817 | GUCAUGGUUUGAGUAAUGA |
| siRNA 1182 | 1182 | CAUUACUCAAACCAUGACU | 4818 | AGUCAUGGUUUGAGUAAUG |
| siRNA 1183 | 1183 | AUUACUCAAACCAUGACUU | 4819 | AAGUCAUGGUUUGAGUAAU |
| siRNA 1184 | 1184 | UUACUCAAACCAUGACUUG | 4820 | CAAGUCAUGGUUUGAGUAA |
| siRNA 1185 | 1185 | UACUCAAACCAUGACUUGG | 4821 | CCAAGUCAUGGUUUGAGUA |
| siRNA 1186 | 1186 | ACUCAAACCAUGACUUGGG | 4822 | CCCAAGUCAUGGUUUGAGU |
| siRNA 1187 | 1187 | CUCAAACCAUGACUUGGGA | 4823 | UCCCAAGUCAUGGUUUGAG |
| siRNA 1188 | 1188 | UCAAACCAUGACUUGGGAU | 4824 | AUCCCAAGUCAUGGUUUGA |
| siRNA 1189 | 1189 | CAAACCAUGACUUGGGAUG | 4825 | CAUCCCAAGUCAUGGUUUG |
| siRNA 1190 | 1190 | AAACCAUGACUUGGGAUGG | 4826 | CCAUCCCAAGUCAUGGUUU |
| siRNA 1191 | 1191 | AACCAUGACUUGGGAUGGC | 4827 | GCCAUCCCAAGUCAUGGUU |
| siRNA 1192 | 1192 | ACCAUGACUUGGGAUGGCA | 4828 | UGCCAUCCCAAGUCAUGGU |
| siRNA 1193 | 1193 | CCAUGACUUGGGAUGGCAG | 4829 | CUGCCAUCCCAAGUCAUGG |
| siRNA 1194 | 1194 | CAUGACUUGGGAUGGCAGA | 4830 | UCUGCCAUCCCAAGUCAUG |
| siRNA 1195 | 1195 | AUGACUUGGGAUGGCAGAA | 4831 | UUCUGCCAUCCCAAGUCAU |
| siRNA 1196 | 1196 | UGACUUGGGAUGGCAGAAU | 4832 | AUUCUGCCAUCCCAAGUCA |
| siRNA 1197 | 1197 | GACUUGGGAUGGCAGAAUC | 4833 | GAUUCUGCCAUCCCAAGUC |
| siRNA 1198 | 1198 | ACUUGGGAUGGCAGAAUCU | 4834 | AGAUUCUGCCAUCCCAAGU |
| siRNA 1199 | 1199 | CUUGGGAUGGCAGAAUCUA | 4835 | UAGAUUCUGCCAUCCCAAG |
| siRNA 1200 | 1200 | UUGGGAUGGCAGAAUCUAG | 4836 | CUAGAUUCUGCCAUCCCAA |
| siRNA 1201 | 1201 | UGGGAUGGCAGAAUCUAGG | 4837 | CCUAGAUUCUGCCAUCCCA |
| siRNA 1202 | 1202 | GGGAUGGCAGAAUCUAGGA | 4838 | UCCUAGAUUCUGCCAUCCC |
| siRNA 1203 | 1203 | GGAUGGCAGAAUCUAGGAA | 4839 | UUCCUAGAUUCUGCCAUCC |
| siRNA 1204 | 1204 | GAUGGCAGAAUCUAGGAAG | 4840 | CUUCCUAGAUUCUGCCAUC |
| siRNA 1205 | 1205 | AUGGCAGAAUCUAGGAAGA | 4841 | UCUUCCUAGAUUCUGCCAU |
| siRNA 1206 | 1206 | UGGCAGAAUCUAGGAAGAC | 4842 | GUCUUCCUAGAUUCUGCCA |
| siRNA 1207 | 1207 | GGCAGAAUCUAGGAAGACC | 4843 | GGUCUUCCUAGAUUCUGCC |
| siRNA 1208 | 1208 | GCAGAAUCUAGGAAGACCA | 4844 | UGGUCUUCCUAGAUUCUGC |
| siRNA 1209 | 1209 | CAGAAUCUAGGAAGACCAC | 4845 | GUGGUCUUCCUAGAUUCUG |
| siRNA 1210 | 1210 | AGAAUCUAGGAAGACCACA | 4846 | UGUGGUCUUCCUAGAUUCU |
| siRNA 1211 | 1211 | GAAUCUAGGAAGACCACAC | 4847 | GUGUGGUCUUCCUAGAUUC |
| siRNA 1212 | 1212 | AAUCUAGGAAGACCACACA | 4848 | UGUGUGGUCUUCCUAGAUU |
| siRNA 1213 | 1213 | AUCUAGGAAGACCACACAC | 4849 | GUGUGUGGUCUUCCUAGAU |
| siRNA 1214 | 1214 | UCUAGGAAGACCACACACU | 4850 | AGUGUGUGGUCUUCCUAGA |
| siRNA 1215 | 1215 | CUAGGAAGACCACACACUA | 4851 | UAGUGUGUGGUCUUCCUAG |
| siRNA 1216 | 1216 | UAGGAAGACCACACACUAA | 4852 | UUAGUGUGUGGUCUUCCUA |
| siRNA 1217 | 1217 | AGGAAGACCACACACUAAG | 4853 | CUUAGUGUGUGGUCUUCCU |
| siRNA 1218 | 1218 | GGAAGACCACACACUAAGA | 4854 | UCUUAGUGUGUGGUCUUCC |
| siRNA 1219 | 1219 | GAAGACCACACACUAAGAU | 4855 | AUCUUAGUGUGUGGUCUUC |
| siRNA 1220 | 1220 | AAGACCACACACUAAGAUG | 4856 | CAUCUUAGUGUGUGGUCUU |
| siRNA 1221 | 1221 | AGACCACACACUAAGAUGU | 4857 | ACAUCUUAGUGUGUGGUCU |
| siRNA 1222 | 1222 | GACCACACACUAAGAUGUC | 4858 | GACAUCUUAGUGUGUGGUC |
| siRNA 1223 | 1223 | ACCACACACUAAGAUGUCA | 4859 | UGACAUCUUAGUGUGUGGU |
| siRNA 1224 | 1224 | CCACACACUAAGAUGUCAC | 4860 | GUGACAUCUUAGUGUGUGG |
| siRNA 1225 | 1225 | CACACACUAAGAUGUCACA | 4861 | UGUGACAUCUUAGUGUGUG |
| siRNA 1226 | 1226 | ACACACUAAGAUGUCACAU | 4862 | AUGUGACAUCUUAGUGUGU |
| siRNA 1227 | 1227 | CACACUAAGAUGUCACAUA | 4863 | UAUGUGACAUCUUAGUGUG |
| siRNA 1228 | 1228 | ACACUAAGAUGUCACAUAU | 4864 | AUAUGUGACAUCUUAGUGU |
| siRNA 1229 | 1229 | CACUAAGAUGUCACAUAUA | 4865 | UAUAUGUGACAUCUUAGUG |
| siRNA 1230 | 1230 | ACUAAGAUGUCACAUAUAA | 4866 | UUAUAUGUGACAUCUUAGU |
| siRNA 1231 | 1231 | CUAAGAUGUCACAUAUAAA | 4867 | UUUAUAUGUGACAUCUUAG |
| siRNA 1232 | 1232 | UAAGAUGUCACAUAUAAAA | 4868 | UUUUAUAUGUGACAUCUUA |
| siRNA 1233 | 1233 | AAGAUGUCACAUAUAAAAG | 4869 | CUUUUAUAUGUGACAUCUU |
| siRNA 1234 | 1234 | AGAUGUCACAUAUAAAAGG | 4870 | CCUUUUAUAUGUGACAUCU |
| siRNA 1235 | 1235 | GAUGUCACAUAUAAAAGGG | 4871 | CCCUUUUAUAUGUGACAUC |
| siRNA 1236 | 1236 | AUGUCACAUAUAAAAGGGC | 4872 | GCCCUUUUAUAUGUGACAU |
| siRNA 1237 | 1237 | UGUCACAUAUAAAAGGGCA | 4873 | UGCCCUUUUAUAUGUGACA |
| siRNA 1238 | 1238 | GUCACAUAUAAAAGGGCAU | 4874 | AUGCCCUUUUAUAUGUGAC |
| siRNA 1239 | 1239 | UCACAUAUAAAAGGGCAUG | 4875 | CAUGCCCUUUUAUAUGUGA |
| siRNA 1240 | 1240 | CACAUAUAAAAGGGCAUGA | 4876 | UCAUGCCCUUUUAUAUGUG |
| siRNA 1241 | 1241 | ACAUAUAAAAGGGCAUGAA | 4877 | UUCAUGCCCUUUUAUAUGU |
| siRNA 1242 | 1242 | CAUAUAAAAGGGCAUGAAG | 4878 | CUUCAUGCCCUUUUAUAUG |
| siRNA 1243 | 1243 | AUAUAAAAGGGCAUGAAGG | 4879 | CCUUCAUGCCCUUUUAUAU |
| siRNA 1244 | 1244 | UAUAAAAGGGCAUGAAGGA | 4880 | UCCUUCAUGCCCUUUUAUA |
| siRNA 1245 | 1245 | AUAAAAGGGCAUGAAGGAG | 4881 | CUCCUUCAUGCCCUUUUAU |
| siRNA 1246 | 1246 | UAAAAGGGCAUGAAGGAGA | 4882 | UCUCCUUCAUGCCCUUUUA |
| siRNA 1247 | 1247 | AAAAGGGCAUGAAGGAGAC | 4883 | GUCUCCUUCAUGCCCUUUU |
| siRNA 1248 | 1248 | AAAGGGCAUGAAGGAGACC | 4884 | GGUCUCCUUCAUGCCCUUU |
| siRNA 1249 | 1249 | AAGGGCAUGAAGGAGACCC | 4885 | GGGUCUCCUUCAUGCCCUU |
| siRNA 1250 | 1250 | AGGGCAUGAAGGAGACCCC | 4886 | GGGGUCUCCUUCAUGCCCU |
| siRNA 1251 | 1251 | GGGCAUGAAGGAGACCCCU | 4887 | AGGGGUCUCCUUCAUGCCC |
| siRNA 1252 | 1252 | GGCAUGAAGGAGACCCCUG | 4888 | CAGGGGUCUCCUUCAUGCC |
| siRNA 1253 | 1253 | GCAUGAAGGAGACCCCUGC | 4889 | GCAGGGGUCUCCUUCAUGC |
| siRNA 1254 | 1254 | CAUGAAGGAGACCCCUGCC | 4890 | GGCAGGGGUCUCCUUCAUG |
| siRNA 1255 | 1255 | AUGAAGGAGACCCCUGCCU | 4891 | AGGCAGGGGUCUCCUUCAU |
| siRNA 1256 | 1256 | UGAAGGAGACCCCUGCCUA | 4892 | UAGGCAGGGGUCUCCUUCA |
| siRNA 1257 | 1257 | GAAGGAGACCCCUGCCUAC | 4893 | GUAGGCAGGGGUCUCCUUC |
| siRNA 1258 | 1258 | AAGGAGACCCCUGCCUACG | 4894 | CGUAGGCAGGGGUCUCCUU |
| siRNA 1259 | 1259 | AGGAGACCCCUGCCUACGA | 4895 | UCGUAGGCAGGGGUCUCCU |
| siRNA 1260 | 1260 | GGAGACCCCUGCCUACGAU | 4896 | AUCGUAGGCAGGGGUCUCC |
| siRNA 1261 | 1261 | GAGACCCCUGCCUACGAUC | 4897 | GAUCGUAGGCAGGGGUCUC |
| siRNA 1262 | 1262 | AGACCCCUGCCUACGAUCA | 4898 | UGAUCGUAGGCAGGGGUCU |
| siRNA 1263 | 1263 | GACCCCUGCCUACGAUCAU | 4899 | AUGAUCGUAGGCAGGGGUC |
| siRNA 1264 | 1264 | ACCCCUGCCUACGAUCAUC | 4900 | GAUGAUCGUAGGCAGGGGU |
| siRNA 1265 | 1265 | CCCCUGCCUACGAUCAUCA | 4901 | UGAUGAUCGUAGGCAGGGG |
| siRNA 1266 | 1266 | CCCUGCCUACGAUCAUCAG | 4902 | CUGAUGAUCGUAGGCAGGG |
| siRNA 1267 | 1267 | CCUGCCUACGAUCAUCAGA | 4903 | UCUGAUGAUCGUAGGCAGG |
| siRNA 1268 | 1268 | CUGCCUACGAUCAUCAGAC | 4904 | GUCUGAUGAUCGUAGGCAG |
| siRNA 1269 | 1269 | UGCCUACGAUCAUCAGACU | 4905 | AGUCUGAUGAUCGUAGGCA |
| siRNA 1270 | 1270 | GCCUACGAUCAUCAGACUG | 4906 | CAGUCUGAUGAUCGUAGGC |
| siRNA 1271 | 1271 | CCUACGAUCAUCAGACUGC | 4907 | GCAGUCUGAUGAUCGUAGG |
| siRNA 1272 | 1272 | CUACGAUCAUCAGACUGCA | 4908 | UGCAGUCUGAUGAUCGUAG |
| siRNA 1273 | 1273 | UACGAUCAUCAGACUGCAU | 4909 | AUGCAGUCUGAUGAUCGUA |
| siRNA 1274 | 1274 | ACGAUCAUCAGACUGCAUU | 4910 | AAUGCAGUCUGAUGAUCGU |
| siRNA 1275 | 1275 | CGAUCAUCAGACUGCAUUG | 4911 | CAAUGCAGUCUGAUGAUCG |
| siRNA 1276 | 1276 | GAUCAUCAGACUGCAUUGA | 4912 | UCAAUGCAGUCUGAUGAUC |
| siRNA 1277 | 1277 | AUCAUCAGACUGCAUUGAA | 4913 | UUCAAUGCAGUCUGAUGAU |
| siRNA 1278 | 1278 | UCAUCAGACUGCAUUGAAG | 4914 | CUUCAAUGCAGUCUGAUGA |
| siRNA 1279 | 1279 | CAUCAGACUGCAUUGAAGG | 4915 | CCUUCAAUGCAGUCUGAUG |
| siRNA 1280 | 1280 | AUCAGACUGCAUUGAAGGG | 4916 | CCCUUCAAUGCAGUCUGAU |
| siRNA 1281 | 1281 | UCAGACUGCAUUGAAGGGU | 4917 | ACCCUUCAAUGCAGUCUGA |
| siRNA 1282 | 1282 | CAGACUGCAUUGAAGGGUU | 4918 | AACCCUUCAAUGCAGUCUG |
| siRNA 1283 | 1283 | AGACUGCAUUGAAGGGUUU | 4919 | AAACCCUUCAAUGCAGUCU |
| siRNA 1284 | 1284 | GACUGCAUUGAAGGGUUUU | 4920 | AAAACCCUUCAAUGCAGUC |
| siRNA 1285 | 1285 | ACUGCAUUGAAGGGUUUUG | 4921 | CAAAACCCUUCAAUGCAGU |
| siRNA 1286 | 1286 | CUGCAUUGAAGGGUUUUGC | 4922 | GCAAAACCCUUCAAUGCAG |
| siRNA 1287 | 1287 | UGCAUUGAAGGGUUUUGCU | 4923 | AGCAAAACCCUUCAAUGCA |
| siRNA 1288 | 1288 | GCAUUGAAGGGUUUUGCUG | 4924 | CAGCAAAACCCUUCAAUGC |
| siRNA 1289 | 1289 | CAUUGAAGGGUUUUGCUGU | 4925 | ACAGCAAAACCCUUCAAUG |
| siRNA 1290 | 1290 | AUUGAAGGGUUUUGCUGUG | 4926 | CACAGCAAAACCCUUCAAU |
| siRNA 1291 | 1291 | UUGAAGGGUUUUGCUGUGC | 4927 | GCACAGCAAAACCCUUCAA |
| siRNA 1292 | 1292 | UGAAGGGUUUUGCUGUGCU | 4928 | AGCACAGCAAAACCCUUCA |
| siRNA 1293 | 1293 | GAAGGGUUUUGCUGUGCUC | 4929 | GAGCACAGCAAAACCCUUC |
| siRNA 1294 | 1294 | AAGGGUUUUGCUGUGCUCG | 4930 | CGAGCACAGCAAAACCCUU |
| siRNA 1295 | 1295 | AGGGUUUUGCUGUGCUCGU | 4931 | ACGAGCACAGCAAAACCCU |
| siRNA 1296 | 1296 | GGGUUUUGCUGUGCUCGUC | 4932 | GACGAGCACAGCAAAACCC |
| siRNA 1297 | 1297 | GGUUUUGCUGUGCUCGUCA | 4933 | UGACGAGCACAGCAAAACC |
| siRNA 1298 | 1298 | GUUUUGCUGUGCUCGUCAU | 4934 | AUGACGAGCACAGCAAAAC |
| siRNA 1299 | 1299 | UUUUGCUGUGCUCGUCAUU | 4935 | AAUGACGAGCACAGCAAAA |
| siRNA 1300 | 1300 | UUUGCUGUGCUCGUCAUUU | 4936 | AAAUGACGAGCACAGCAAA |
| siRNA 1301 | 1301 | UUGCUGUGCUCGUCAUUUC | 4937 | GAAAUGACGAGCACAGCAA |
| siRNA 1302 | 1302 | UGCUGUGCUCGUCAUUUCU | 4938 | AGAAAUGACGAGCACAGCA |
| siRNA 1303 | 1303 | GCUGUGCUCGUCAUUUCUG | 4939 | CAGAAAUGACGAGCACAGC |
| siRNA 1304 | 1304 | CUGUGCUCGUCAUUUCUGG | 4940 | CCAGAAAUGACGAGCACAG |
| siRNA 1305 | 1305 | UGUGCUCGUCAUUUCUGGA | 4941 | UCCAGAAAUGACGAGCACA |
| siRNA 1306 | 1306 | GUGCUCGUCAUUUCUGGAC | 4942 | GUCCAGAAAUGACGAGCAC |
| siRNA 1307 | 1307 | UGCUCGUCAUUUCUGGACC | 4943 | GGUCCAGAAAUGACGAGCA |
| siRNA 1308 | 1308 | GCUCGUCAUUUCUGGACCA | 4944 | UGGUCCAGAAAUGACGAGC |
| siRNA 1309 | 1309 | CUCGUCAUUUCUGGACCAA | 4945 | UUGGUCCAGAAAUGACGAG |
| siRNA 1310 | 1310 | UCGUCAUUUCUGGACCAAA | 4946 | UUUGGUCCAGAAAUGACGA |
| siRNA 1311 | 1311 | CGUCAUUUCUGGACCAAAA | 4947 | UUUUGGUCCAGAAAUGACG |
| siRNA 1312 | 1312 | GUCAUUUCUGGACCAAAAU | 4948 | AUUUUGGUCCAGAAAUGAC |
| siRNA 1313 | 1313 | UCAUUUCUGGACCAAAAUC | 4949 | GAUUUUGGUCCAGAAAUGA |
| siRNA 1314 | 1314 | CAUUUCUGGACCAAAAUCU | 4950 | AGAUUUUGGUCCAGAAAUG |
| siRNA 1315 | 1315 | AUUUCUGGACCAAAAUCUG | 4951 | CAGAUUUUGGUCCAGAAAU |
| siRNA 1316 | 1316 | UUUCUGGACCAAAAUCUGC | 4952 | GCAGAUUUUGGUCCAGAAA |
| siRNA 1317 | 1317 | UUCUGGACCAAAAUCUGCA | 4953 | UGCAGAUUUUGGUCCAGAA |
| siRNA 1318 | 1318 | UCUGGACCAAAAUCUGCAA | 4954 | UUGCAGAUUUUGGUCCAGA |
| siRNA 1319 | 1319 | CUGGACCAAAAUCUGCAAA | 4955 | UUUGCAGAUUUUGGUCCAG |
| siRNA 1320 | 1320 | UGGACCAAAAUCUGCAAAC | 4956 | GUUUGCAGAUUUUGGUCCA |
| siRNA 1321 | 1321 | GGACCAAAAUCUGCAAACC | 4957 | GGUUUGCAGAUUUUGGUCC |
| siRNA 1322 | 1322 | GACCAAAAUCUGCAAACCA | 4958 | UGGUUUGCAGAUUUUGGUC |
| siRNA 1323 | 1323 | ACCAAAAUCUGCAAACCAG | 4959 | CUGGUUUGCAGAUUUUGGU |
| siRNA 1324 | 1324 | CCAAAAUCUGCAAACCAGU | 4960 | ACUGGUUUGCAGAUUUUGG |
| siRNA 1325 | 1325 | CAAAAUCUGCAAACCAGUG | 4961 | CACUGGUUUGCAGAUUUUG |
| siRNA 1326 | 1326 | AAAAUCUGCAAACCAGUGC | 4962 | GCACUGGUUUGCAGAUUUU |
| siRNA 1327 | 1327 | AAAUCUGCAAACCAGUGCU | 4963 | AGCACUGGUUUGCAGAUUU |
| siRNA 1328 | 1328 | AAUCUGCAAACCAGUGCUC | 4964 | GAGCACUGGUUUGCAGAUU |
| siRNA 1329 | 1329 | AUCUGCAAACCAGUGCUCC | 4965 | GGAGCACUGGUUUGCAGAU |
| siRNA 1330 | 1330 | UCUGCAAACCAGUGCUCCA | 4966 | UGGAGCACUGGUUUGCAGA |
| siRNA 1331 | 1331 | CUGCAAACCAGUGCUCCAU | 4967 | AUGGAGCACUGGUUUGCAG |
| siRNA 1332 | 1332 | UGCAAACCAGUGCUCCAUC | 4968 | GAUGGAGCACUGGUUUGCA |
| siRNA 1333 | 1333 | GCAAACCAGUGCUCCAUCA | 4969 | UGAUGGAGCACUGGUUUGC |
| siRNA 1334 | 1334 | CAAACCAGUGCUCCAUCAG | 4970 | CUGAUGGAGCACUGGUUUG |
| siRNA 1335 | 1335 | AAACCAGUGCUCCAUCAGG | 4971 | CCUGAUGGAGCACUGGUUU |
| siRNA 1336 | 1336 | AACCAGUGCUCCAUCAGGG | 4972 | CCCUGAUGGAGCACUGGUU |
| siRNA 1337 | 1337 | ACCAGUGCUCCAUCAGGGG | 4973 | CCCCUGAUGGAGCACUGGU |
| siRNA 1338 | 1338 | CCAGUGCUCCAUCAGGGGG | 4974 | CCCCCUGAUGGAGCACUGG |
| siRNA 1339 | 1339 | CAGUGCUCCAUCAGGGGGA | 4975 | UCCCCCUGAUGGAGCACUG |
| siRNA 1340 | 1340 | AGUGCUCCAUCAGGGGGAA | 4976 | UUCCCCCUGAUGGAGCACU |
| siRNA 1341 | 1341 | GUGCUCCAUCAGGGGGAAG | 4977 | CUUCCCCCUGAUGGAGCAC |
| siRNA 1342 | 1342 | UGCUCCAUCAGGGGGAAGU | 4978 | ACUUCCCCCUGAUGGAGCA |
| siRNA 1343 | 1343 | GCUCCAUCAGGGGGAAGUC | 4979 | GACUUCCCCCUGAUGGAGC |
| siRNA 1344 | 1344 | CUCCAUCAGGGGGAAGUCU | 4980 | AGACUUCCCCCUGAUGGAG |
| siRNA 1345 | 1345 | UCCAUCAGGGGGAAGUCUG | 4981 | CAGACUUCCCCCUGAUGGA |
| siRNA 1346 | 1346 | CCAUCAGGGGGAAGUCUGU | 4982 | ACAGACUUCCCCCUGAUGG |
| siRNA 1347 | 1347 | CAUCAGGGGGAAGUCUGUA | 4983 | UACAGACUUCCCCCUGAUG |
| siRNA 1348 | 1348 | AUCAGGGGGAAGUCUGUAC | 4984 | GUACAGACUUCCCCCUGAU |
| siRNA 1349 | 1349 | UCAGGGGGAAGUCUGUACC | 4985 | GGUACAGACUUCCCCCUGA |
| siRNA 1350 | 1350 | CAGGGGGAAGUCUGUACCA | 4986 | UGGUACAGACUUCCCCCUG |
| siRNA 1351 | 1351 | AGGGGGAAGUCUGUACCAA | 4987 | UUGGUACAGACUUCCCCCU |
| siRNA 1352 | 1352 | GGGGGAAGUCUGUACCAAA | 4988 | UUUGGUACAGACUUCCCCC |
| siRNA 1353 | 1353 | GGGGAAGUCUGUACCAAAC | 4989 | GUUUGGUACAGACUUCCCC |
| siRNA 1354 | 1354 | GGGAAGUCUGUACCAAACA | 4990 | UGUUUGGUACAGACUUCCC |
| siRNA 1355 | 1355 | GGAAGUCUGUACCAAACAA | 4991 | UUGUUUGGUACAGACUUCC |
| siRNA 1356 | 1356 | GAAGUCUGUACCAAACAAC | 4992 | GUUGUUUGGUACAGACUUC |
| siRNA 1357 | 1357 | AAGUCUGUACCAAACAACG | 4993 | CGUUGUUUGGUACAGACUU |
| siRNA 1358 | 1358 | AGUCUGUACCAAACAACGC | 4994 | GCGUUGUUUGGUACAGACU |
| siRNA 1359 | 1359 | GUCUGUACCAAACAACGCA | 4995 | UGCGUUGUUUGGUACAGAC |
| siRNA 1360 | 1360 | UCUGUACCAAACAACGCAA | 4996 | UUGCGUUGUUUGGUACAGA |
| siRNA 1361 | 1361 | CUGUACCAAACAACGCAAG | 4997 | CUUGCGUUGUUUGGUACAG |
| siRNA 1362 | 1362 | UGUACCAAACAACGCAAGA | 4998 | UCUUGCGUUGUUUGGUACA |
| siRNA 1363 | 1363 | GUACCAAACAACGCAAGAA | 4999 | UUCUUGCGUUGUUUGGUAC |
| siRNA 1364 | 1364 | UACCAAACAACGCAAGAAG | 5000 | CUUCUUGCGUUGUUUGGUA |
| siRNA 1365 | 1365 | ACCAAACAACGCAAGAAGG | 5001 | CCUUCUUGCGUUGUUUGGU |
| siRNA 1366 | 1366 | CCAAACAACGCAAGAAGGG | 5002 | CCCUUCUUGCGUUGUUUGG |
| siRNA 1367 | 1367 | CAAACAACGCAAGAAGGGU | 5003 | ACCCUUCUUGCGUUGUUUG |
| siRNA 1368 | 1368 | AAACAACGCAAGAAGGGUU | 5004 | AACCCUUCUUGCGUUGUUU |
| siRNA 1369 | 1369 | AACAACGCAAGAAGGGUUC | 5005 | GAACCCUUCUUGCGUUGUU |
| siRNA 1370 | 1370 | ACAACGCAAGAAGGGUUCU | 5006 | AGAACCCUUCUUGCGUUGU |
| siRNA 1371 | 1371 | CAACGCAAGAAGGGUUCUC | 5007 | GAGAACCCUUCUUGCGUUG |
| siRNA 1372 | 1372 | AACGCAAGAAGGGUUCUCA | 5008 | UGAGAACCCUUCUUGCGUU |
| siRNA 1373 | 1373 | ACGCAAGAAGGGUUCUCAU | 5009 | AUGAGAACCCUUCUUGCGU |
| siRNA 1374 | 1374 | CGCAAGAAGGGUUCUCAUG | 5010 | CAUGAGAACCCUUCUUGCG |
| siRNA 1375 | 1375 | GCAAGAAGGGUUCUCAUGG | 5011 | CCAUGAGAACCCUUCUUGC |
| siRNA 1376 | 1376 | CAAGAAGGGUUCUCAUGGG | 5012 | CCCAUGAGAACCCUUCUUG |
| siRNA 1377 | 1377 | AAGAAGGGUUCUCAUGGGC | 5013 | GCCCAUGAGAACCCUUCUU |
| siRNA 1378 | 1378 | AGAAGGGUUCUCAUGGGCU | 5014 | AGCCCAUGAGAACCCUUCU |
| siRNA 1379 | 1379 | GAAGGGUUCUCAUGGGCUG | 5015 | CAGCCCAUGAGAACCCUUC |
| siRNA 1380 | 1380 | AAGGGUUCUCAUGGGCUGG | 5016 | CCAGCCCAUGAGAACCCUU |
| siRNA 1381 | 1381 | AGGGUUCUCAUGGGCUGGA | 5017 | UCCAGCCCAUGAGAACCCU |
| siRNA 1382 | 1382 | GGGUUCUCAUGGGCUGGAA | 5018 | UUCCAGCCCAUGAGAACCC |
| siRNA 1383 | 1383 | GGUUCUCAUGGGCUGGAAA | 5019 | UUUCCAGCCCAUGAGAACC |
| siRNA 1384 | 1384 | GUUCUCAUGGGCUGGAAAU | 5020 | AUUUCCAGCCCAUGAGAAC |
| siRNA 1385 | 1385 | UUCUCAUGGGCUGGAAAUU | 5021 | AAUUUCCAGCCCAUGAGAA |
| siRNA 1386 | 1386 | UCUCAUGGGCUGGAAAUUU | 5022 | AAAUUUCCAGCCCAUGAGA |
| siRNA 1387 | 1387 | CUCAUGGGCUGGAAAUUUU | 5023 | AAAAUUUCCAGCCCAUGAG |
| siRNA 1388 | 1388 | UCAUGGGCUGGAAAUUUUC | 5024 | GAAAAUUUCCAGCCCAUGA |
| siRNA 1389 | 1389 | CAUGGGCUGGAAAUUUUCC | 5025 | GGAAAAUUUCCAGCCCAUG |
| siRNA 1390 | 1390 | AUGGGCUGGAAAUUUUCCA | 5026 | UGGAAAAUUUCCAGCCCAU |
| siRNA 1391 | 1391 | UGGGCUGGAAAUUUUCCAG | 5027 | CUGGAAAAUUUCCAGCCCA |
| siRNA 1392 | 1392 | GGGCUGGAAAUUUUCCAGC | 5028 | GCUGGAAAAUUUCCAGCCC |
| siRNA 1393 | 1393 | GGCUGGAAAUUUUCCAGCG | 5029 | CGCUGGAAAAUUUCCAGCC |
| siRNA 1394 | 1394 | GCUGGAAAUUUUCCAGCGU | 5030 | ACGCUGGAAAAUUUCCAGC |
| siRNA 1395 | 1395 | CUGGAAAUUUUCCAGCGUU | 5031 | AACGCUGGAAAAUUUCCAG |
| siRNA 1396 | 1396 | UGGAAAUUUUCCAGCGUUG | 5032 | CAACGCUGGAAAAUUUCCA |
| siRNA 1397 | 1397 | GGAAAUUUUCCAGCGUUGC | 5033 | GCAACGCUGGAAAAUUUCC |
| siRNA 1398 | 1398 | GAAAUUUUCCAGCGUUGCG | 5034 | CGCAACGCUGGAAAAUUUC |
| siRNA 1399 | 1399 | AAAUUUUCCAGCGUUGCGA | 5035 | UCGCAACGCUGGAAAAUUU |
| siRNA 1400 | 1400 | AAUUUUCCAGCGUUGCGAC | 5036 | GUCGCAACGCUGGAAAAUU |
| siRNA 1401 | 1401 | AUUUUCCAGCGUUGCGACU | 5037 | AGUCGCAACGCUGGAAAAU |
| siRNA 1402 | 1402 | UUUUCCAGCGUUGCGACUG | 5038 | CAGUCGCAACGCUGGAAAA |
| siRNA 1403 | 1403 | UUUCCAGCGUUGCGACUGU | 5039 | ACAGUCGCAACGCUGGAAA |
| siRNA 1404 | 1404 | UUCCAGCGUUGCGACUGUG | 5040 | CACAGUCGCAACGCUGGAA |
| siRNA 1405 | 1405 | UCCAGCGUUGCGACUGUGC | 5041 | GCACAGUCGCAACGCUGGA |
| siRNA 1406 | 1406 | CCAGCGUUGCGACUGUGCG | 5042 | CGCACAGUCGCAACGCUGG |
| siRNA 1407 | 1407 | CAGCGUUGCGACUGUGCGA | 5043 | UCGCACAGUCGCAACGCUG |
| siRNA 1408 | 1408 | AGCGUUGCGACUGUGCGAA | 5044 | UUCGCACAGUCGCAACGCU |
| siRNA 1409 | 1409 | GCGUUGCGACUGUGCGAAG | 5045 | CUUCGCACAGUCGCAACGC |
| siRNA 1410 | 1410 | CGUUGCGACUGUGCGAAGG | 5046 | CCUUCGCACAGUCGCAACG |
| siRNA 1411 | 1411 | GUUGCGACUGUGCGAAGGG | 5047 | CCCUUCGCACAGUCGCAAC |
| siRNA 1412 | 1412 | UUGCGACUGUGCGAAGGGC | 5048 | GCCCUUCGCACAGUCGCAA |
| siRNA 1413 | 1413 | UGCGACUGUGCGAAGGGCC | 5049 | GGCCCUUCGCACAGUCGCA |
| siRNA 1414 | 1414 | GCGACUGUGCGAAGGGCCU | 5050 | AGGCCCUUCGCACAGUCGC |
| siRNA 1415 | 1415 | CGACUGUGCGAAGGGCCUG | 5051 | CAGGCCCUUCGCACAGUCG |
| siRNA 1416 | 1416 | GACUGUGCGAAGGGCCUGU | 5052 | ACAGGCCCUUCGCACAGUC |
| siRNA 1417 | 1417 | ACUGUGCGAAGGGCCUGUC | 5053 | GACAGGCCCUUCGCACAGU |
| siRNA 1418 | 1418 | CUGUGCGAAGGGCCUGUCU | 5054 | AGACAGGCCCUUCGCACAG |
| siRNA 1419 | 1419 | UGUGCGAAGGGCCUGUCUU | 5055 | AAGACAGGCCCUUCGCACA |
| siRNA 1420 | 1420 | GUGCGAAGGGCCUGUCUUG | 5056 | CAAGACAGGCCCUUCGCAC |
| siRNA 1421 | 1421 | UGCGAAGGGCCUGUCUUGC | 5057 | GCAAGACAGGCCCUUCGCA |
| siRNA 1422 | 1422 | GCGAAGGGCCUGUCUUGCA | 5058 | UGCAAGACAGGCCCUUCGC |
| siRNA 1423 | 1423 | CGAAGGGCCUGUCUUGCAA | 5059 | UUGCAAGACAGGCCCUUCG |
| siRNA 1424 | 1424 | GAAGGGCCUGUCUUGCAAA | 5060 | UUUGCAAGACAGGCCCUUC |
| siRNA 1425 | 1425 | AAGGGCCUGUCUUGCAAAG | 5061 | CUUUGCAAGACAGGCCCUU |
| siRNA 1426 | 1426 | AGGGCCUGUCUUGCAAAGU | 5062 | ACUUUGCAAGACAGGCCCU |
| siRNA 1427 | 1427 | GGGCCUGUCUUGCAAAGUA | 5063 | UACUUUGCAAGACAGGCCC |
| siRNA 1428 | 1428 | GGCCUGUCUUGCAAAGUAU | 5064 | AUACUUUGCAAGACAGGCC |
| siRNA 1429 | 1429 | GCCUGUCUUGCAAAGUAUG | 5065 | CAUACUUUGCAAGACAGGC |
| siRNA 1430 | 1430 | CCUGUCUUGCAAAGUAUGG | 5066 | CCAUACUUUGCAAGACAGG |
| siRNA 1431 | 1431 | CUGUCUUGCAAAGUAUGGA | 5067 | UCCAUACUUUGCAAGACAG |
| siRNA 1432 | 1432 | UGUCUUGCAAAGUAUGGAA | 5068 | UUCCAUACUUUGCAAGACA |
| siRNA 1433 | 1433 | GUCUUGCAAAGUAUGGAAA | 5069 | UUUCCAUACUUUGCAAGAC |
| siRNA 1434 | 1434 | UCUUGCAAAGUAUGGAAAG | 5070 | CUUUCCAUACUUUGCAAGA |
| siRNA 1435 | 1435 | CUUGCAAAGUAUGGAAAGA | 5071 | UCUUUCCAUACUUUGCAAG |
| siRNA 1436 | 1436 | UUGCAAAGUAUGGAAAGAU | 5072 | AUCUUUCCAUACUUUGCAA |
| siRNA 1437 | 1437 | UGCAAAGUAUGGAAAGAUG | 5073 | CAUCUUUCCAUACUUUGCA |
| siRNA 1438 | 1438 | GCAAAGUAUGGAAAGAUGC | 5074 | GCAUCUUUCCAUACUUUGC |
| siRNA 1439 | 1439 | CAAAGUAUGGAAAGAUGCC | 5075 | GGCAUCUUUCCAUACUUUG |
| siRNA 1440 | 1440 | AAAGUAUGGAAAGAUGCCA | 5076 | UGGCAUCUUUCCAUACUUU |
| siRNA 1441 | 1441 | AAGUAUGGAAAGAUGCCAC | 5077 | GUGGCAUCUUUCCAUACUU |
| siRNA 1442 | 1442 | AGUAUGGAAAGAUGCCACC | 5078 | GGUGGCAUCUUUCCAUACU |
| siRNA 1443 | 1443 | GUAUGGAAAGAUGCCACCU | 5079 | AGGUGGCAUCUUUCCAUAC |
| siRNA 1444 | 1444 | UAUGGAAAGAUGCCACCUA | 5080 | UAGGUGGCAUCUUUCCAUA |
| siRNA 1445 | 1445 | AUGGAAAGAUGCCACCUAC | 5081 | GUAGGUGGCAUCUUUCCAU |
| siRNA 1446 | 1446 | UGGAAAGAUGCCACCUACU | 5082 | AGUAGGUGGCAUCUUUCCA |
| siRNA 1447 | 1447 | GGAAAGAUGCCACCUACUC | 5083 | GAGUAGGUGGCAUCUUUCC |
| siRNA 1448 | 1448 | GAAAGAUGCCACCUACUCC | 5084 | GGAGUAGGUGGCAUCUUUC |
| siRNA 1449 | 1449 | AAAGAUGCCACCUACUCCU | 5085 | AGGAGUAGGUGGCAUCUUU |
| siRNA 1450 | 1450 | AAGAUGCCACCUACUCCUC | 5086 | GAGGAGUAGGUGGCAUCUU |
| siRNA 1451 | 1451 | AGAUGCCACCUACUCCUCC | 5087 | GGAGGAGUAGGUGGCAUCU |
| siRNA 1452 | 1452 | GAUGCCACCUACUCCUCCA | 5088 | UGGAGGAGUAGGUGGCAUC |
| siRNA 1453 | 1453 | AUGCCACCUACUCCUCCAA | 5089 | UUGGAGGAGUAGGUGGCAU |
| siRNA 1454 | 1454 | UGCCACCUACUCCUCCAAA | 5090 | UUUGGAGGAGUAGGUGGCA |
| siRNA 1455 | 1455 | GCCACCUACUCCUCCAAAG | 5091 | CUUUGGAGGAGUAGGUGGC |
| siRNA 1456 | 1456 | CCACCUACUCCUCCAAAGC | 5092 | GCUUUGGAGGAGUAGGUGG |
| siRNA 1457 | 1457 | CACCUACUCCUCCAAAGCC | 5093 | GGCUUUGGAGGAGUAGGUG |
| siRNA 1458 | 1458 | ACCUACUCCUCCAAAGCCA | 5094 | UGGCUUUGGAGGAGUAGGU |
| siRNA 1459 | 1459 | CCUACUCCUCCAAAGCCAG | 5095 | CUGGCUUUGGAGGAGUAGG |
| siRNA 1460 | 1460 | CUACUCCUCCAAAGCCAGA | 5096 | UCUGGCUUUGGAGGAGUAG |
| siRNA 1461 | 1461 | UACUCCUCCAAAGCCAGAC | 5097 | GUCUGGCUUUGGAGGAGUA |
| siRNA 1462 | 1462 | ACUCCUCCAAAGCCAGACU | 5098 | AGUCUGGCUUUGGAGGAGU |
| siRNA 1463 | 1463 | CUCCUCCAAAGCCAGACUC | 5099 | GAGUCUGGCUUUGGAGGAG |
| siRNA 1464 | 1464 | UCCUCCAAAGCCAGACUCC | 5100 | GGAGUCUGGCUUUGGAGGA |
| siRNA 1465 | 1465 | CCUCCAAAGCCAGACUCCA | 5101 | UGGAGUCUGGCUUUGGAGG |
| siRNA 1466 | 1466 | CUCCAAAGCCAGACUCCAU | 5102 | AUGGAGUCUGGCUUUGGAG |
| siRNA 1467 | 1467 | UCCAAAGCCAGACUCCAUG | 5103 | CAUGGAGUCUGGCUUUGGA |
| siRNA 1468 | 1468 | CCAAAGCCAGACUCCAUGU | 5104 | ACAUGGAGUCUGGCUUUGG |
| siRNA 1469 | 1469 | CAAAGCCAGACUCCAUGUG | 5105 | CACAUGGAGUCUGGCUUUG |
| siRNA 1470 | 1470 | AAAGCCAGACUCCAUGUGU | 5106 | ACACAUGGAGUCUGGCUUU |
| siRNA 1471 | 1471 | AAGCCAGACUCCAUGUGUG | 5107 | CACACAUGGAGUCUGGCUU |
| siRNA 1472 | 1472 | AGCCAGACUCCAUGUGUGU | 5108 | ACACACAUGGAGUCUGGCU |
| siRNA 1473 | 1473 | GCCAGACUCCAUGUGUGUC | 5109 | GACACACAUGGAGUCUGGC |
| siRNA 1474 | 1474 | CCAGACUCCAUGUGUGUCA | 5110 | UGACACACAUGGAGUCUGG |
| siRNA 1475 | 1475 | CAGACUCCAUGUGUGUCAG | 5111 | CUGACACACAUGGAGUCUG |
| siRNA 1476 | 1476 | AGACUCCAUGUGUGUCAGA | 5112 | UCUGACACACAUGGAGUCU |
| siRNA 1477 | 1477 | GACUCCAUGUGUGUCAGAA | 5113 | UUCUGACACACAUGGAGUC |
| siRNA 1478 | 1478 | ACUCCAUGUGUGUCAGAAA | 5114 | UUUCUGACACACAUGGAGU |
| siRNA 1479 | 1479 | CUCCAUGUGUGUCAGAAAA | 5115 | UUUUCUGACACACAUGGAG |
| siRNA 1480 | 1480 | UCCAUGUGUGUCAGAAAAU | 5116 | AUUUUCUGACACACAUGGA |
| siRNA 1481 | 1481 | CCAUGUGUGUCAGAAAAUU | 5117 | AAUUUUCUGACACACAUGG |
| siRNA 1482 | 1482 | CAUGUGUGUCAGAAAAUUU | 5118 | AAAUUUUCUGACACACAUG |
| siRNA 1483 | 1483 | AUGUGUGUCAGAAAAUUUG | 5119 | CAAAUUUUCUGACACACAU |
| siRNA 1484 | 1484 | UGUGUGUCAGAAAAUUUGA | 5120 | UCAAAUUUUCUGACACACA |
| siRNA 1485 | 1485 | GUGUGUCAGAAAAUUUGAU | 5121 | AUCAAAUUUUCUGACACAC |
| siRNA 1486 | 1486 | UGUGUCAGAAAAUUUGAUC | 5122 | GAUCAAAUUUUCUGACACA |
| siRNA 1487 | 1487 | GUGUCAGAAAAUUUGAUCA | 5123 | UGAUCAAAUUUUCUGACAC |
| siRNA 1488 | 1488 | UGUCAGAAAAUUUGAUCAC | 5124 | GUGAUCAAAUUUUCUGACA |
| siRNA 1489 | 1489 | GUCAGAAAAUUUGAUCACC | 5125 | GGUGAUCAAAUUUUCUGAC |
| siRNA 1490 | 1490 | UCAGAAAAUUUGAUCACCA | 5126 | UGGUGAUCAAAUUUUCUGA |
| siRNA 1491 | 1491 | CAGAAAAUUUGAUCACCAU | 5127 | AUGGUGAUCAAAUUUUCUG |
| siRNA 1492 | 1492 | AGAAAAUUUGAUCACCAUU | 5128 | AAUGGUGAUCAAAUUUUCU |
| siRNA 1493 | 1493 | GAAAAUUUGAUCACCAUUG | 5129 | CAAUGGUGAUCAAAUUUUC |
| siRNA 1494 | 1494 | AAAAUUUGAUCACCAUUGA | 5130 | UCAAUGGUGAUCAAAUUUU |
| siRNA 1495 | 1495 | AAAUUUGAUCACCAUUGAG | 5131 | CUCAAUGGUGAUCAAAUUU |
| siRNA 1496 | 1496 | AAUUUGAUCACCAUUGAGG | 5132 | CCUCAAUGGUGAUCAAAUU |
| siRNA 1497 | 1497 | AUUUGAUCACCAUUGAGGA | 5133 | UCCUCAAUGGUGAUCAAAU |
| siRNA 1498 | 1498 | UUUGAUCACCAUUGAGGAA | 5134 | UUCCUCAAUGGUGAUCAAA |
| siRNA 1499 | 1499 | UUGAUCACCAUUGAGGAAC | 5135 | GUUCCUCAAUGGUGAUCAA |
| siRNA 1500 | 1500 | UGAUCACCAUUGAGGAACA | 5136 | UGUUCCUCAAUGGUGAUCA |
| siRNA 1501 | 1501 | GAUCACCAUUGAGGAACAU | 5137 | AUGUUCCUCAAUGGUGAUC |
| siRNA 1502 | 1502 | AUCACCAUUGAGGAACAUC | 5138 | GAUGUUCCUCAAUGGUGAU |
| siRNA 1503 | 1503 | UCACCAUUGAGGAACAUCA | 5139 | UGAUGUUCCUCAAUGGUGA |
| siRNA 1504 | 1504 | CACCAUUGAGGAACAUCAU | 5140 | AUGAUGUUCCUCAAUGGUG |
| siRNA 1505 | 1505 | ACCAUUGAGGAACAUCAUC | 5141 | GAUGAUGUUCCUCAAUGGU |
| siRNA 1506 | 1506 | CCAUUGAGGAACAUCAUCA | 5142 | UGAUGAUGUUCCUCAAUGG |
| siRNA 1507 | 1507 | CAUUGAGGAACAUCAUCAA | 5143 | UUGAUGAUGUUCCUCAAUG |
| siRNA 1508 | 1508 | AUUGAGGAACAUCAUCAAU | 5144 | AUUGAUGAUGUUCCUCAAU |
| siRNA 1509 | 1509 | UUGAGGAACAUCAUCAAUU | 5145 | AAUUGAUGAUGUUCCUCAA |
| siRNA 1510 | 1510 | UGAGGAACAUCAUCAAUUG | 5146 | CAAUUGAUGAUGUUCCUCA |
| siRNA 1511 | 1511 | GAGGAACAUCAUCAAUUGC | 5147 | GCAAUUGAUGAUGUUCCUC |
| siRNA 1512 | 1512 | AGGAACAUCAUCAAUUGCA | 5148 | UGCAAUUGAUGAUGUUCCU |
| siRNA 1513 | 1513 | GGAACAUCAUCAAUUGCAG | 5149 | CUGCAAUUGAUGAUGUUCC |
| siRNA 1514 | 1514 | GAACAUCAUCAAUUGCAGA | 5150 | UCUGCAAUUGAUGAUGUUC |
| siRNA 1515 | 1515 | AACAUCAUCAAUUGCAGAC | 5151 | GUCUGCAAUUGAUGAUGUU |
| siRNA 1516 | 1516 | ACAUCAUCAAUUGCAGACU | 5152 | AGUCUGCAAUUGAUGAUGU |
| siRNA 1517 | 1517 | CAUCAUCAAUUGCAGACUG | 5153 | CAGUCUGCAAUUGAUGAUG |
| siRNA 1518 | 1518 | AUCAUCAAUUGCAGACUGU | 5154 | ACAGUCUGCAAUUGAUGAU |
| siRNA 1519 | 1519 | UCAUCAAUUGCAGACUGUG | 5155 | CACAGUCUGCAAUUGAUGA |
| siRNA 1520 | 1520 | CAUCAAUUGCAGACUGUGA | 5156 | UCACAGUCUGCAAUUGAUG |
| siRNA 1521 | 1521 | AUCAAUUGCAGACUGUGAA | 5157 | UUCACAGUCUGCAAUUGAU |
| siRNA 1522 | 1522 | UCAAUUGCAGACUGUGAAG | 5158 | CUUCACAGUCUGCAAUUGA |
| siRNA 1523 | 1523 | CAAUUGCAGACUGUGAAGU | 5159 | ACUUCACAGUCUGCAAUUG |
| siRNA 1524 | 1524 | AAUUGCAGACUGUGAAGUU | 5160 | AACUUCACAGUCUGCAAUU |
| siRNA 1525 | 1525 | AUUGCAGACUGUGAAGUUG | 5161 | CAACUUCACAGUCUGCAAU |
| siRNA 1526 | 1526 | UUGCAGACUGUGAAGUUGU | 5162 | ACAACUUCACAGUCUGCAA |
| siRNA 1527 | 1527 | UGCAGACUGUGAAGUUGUG | 5163 | CACAACUUCACAGUCUGCA |
| siRNA 1528 | 1528 | GCAGACUGUGAAGUUGUGU | 5164 | ACACAACUUCACAGUCUGC |
| siRNA 1529 | 1529 | CAGACUGUGAAGUUGUGUA | 5165 | UACACAACUUCACAGUCUG |
| siRNA 1530 | 1530 | AGACUGUGAAGUUGUGUAU | 5166 | AUACACAACUUCACAGUCU |
| siRNA 1531 | 1531 | GACUGUGAAGUUGUGUAUU | 5167 | AAUACACAACUUCACAGUC |
| siRNA 1532 | 1532 | ACUGUGAAGUUGUGUAUUU | 5168 | AAAUACACAACUUCACAGU |
| siRNA 1533 | 1533 | CUGUGAAGUUGUGUAUUUA | 5169 | UAAAUACACAACUUCACAG |
| siRNA 1534 | 1534 | UGUGAAGUUGUGUAUUUAA | 5170 | UUAAAUACACAACUUCACA |
| siRNA 1535 | 1535 | GUGAAGUUGUGUAUUUAAU | 5171 | AUUAAAUACACAACUUCAC |
| siRNA 1536 | 1536 | UGAAGUUGUGUAUUUAAUG | 5172 | CAUUAAAUACACAACUUCA |
| siRNA 1537 | 1537 | GAAGUUGUGUAUUUAAUGC | 5173 | GCAUUAAAUACACAACUUC |
| siRNA 1538 | 1538 | AAGUUGUGUAUUUAAUGCA | 5174 | UGCAUUAAAUACACAACUU |
| siRNA 1539 | 1539 | AGUUGUGUAUUUAAUGCAU | 5175 | AUGCAUUAAAUACACAACU |
| siRNA 1540 | 1540 | GUUGUGUAUUUAAUGCAUU | 5176 | AAUGCAUUAAAUACACAAC |
| siRNA 1541 | 1541 | UUGUGUAUUUAAUGCAUUA | 5177 | UAAUGCAUUAAAUACACAA |
| siRNA 1542 | 1542 | UGUGUAUUUAAUGCAUUAU | 5178 | AUAAUGCAUUAAAUACACA |
| siRNA 1543 | 1543 | GUGUAUUUAAUGCAUUAUA | 5179 | UAUAAUGCAUUAAAUACAC |
| siRNA 1544 | 1544 | UGUAUUUAAUGCAUUAUAG | 5180 | CUAUAAUGCAUUAAAUACA |
| siRNA 1545 | 1545 | GUAUUUAAUGCAUUAUAGC | 5181 | GCUAUAAUGCAUUAAAUAC |
| siRNA 1546 | 1546 | UAUUUAAUGCAUUAUAGCA | 5182 | UGCUAUAAUGCAUUAAAUA |
| siRNA 1547 | 1547 | AUUUAAUGCAUUAUAGCAU | 5183 | AUGCUAUAAUGCAUUAAAU |
| siRNA 1548 | 1548 | UUUAAUGCAUUAUAGCAUG | 5184 | CAUGCUAUAAUGCAUUAAA |
| siRNA 1549 | 1549 | UUAAUGCAUUAUAGCAUGG | 5185 | CCAUGCUAUAAUGCAUUAA |
| siRNA 1550 | 1550 | UAAUGCAUUAUAGCAUGGU | 5186 | ACCAUGCUAUAAUGCAUUA |
| siRNA 1551 | 1551 | AAUGCAUUAUAGCAUGGUG | 5187 | CACCAUGCUAUAAUGCAUU |
| siRNA 1552 | 1552 | AUGCAUUAUAGCAUGGUGG | 5188 | CCACCAUGCUAUAAUGCAU |
| siRNA 1553 | 1553 | UGCAUUAUAGCAUGGUGGA | 5189 | UCCACCAUGCUAUAAUGCA |
| siRNA 1554 | 1554 | GCAUUAUAGCAUGGUGGAA | 5190 | UUCCACCAUGCUAUAAUGC |
| siRNA 1555 | 1555 | CAUUAUAGCAUGGUGGAAA | 5191 | UUUCCACCAUGCUAUAAUG |
| siRNA 1556 | 1556 | AUUAUAGCAUGGUGGAAAA | 5192 | UUUUCCACCAUGCUAUAAU |
| siRNA 1557 | 1557 | UUAUAGCAUGGUGGAAAAU | 5193 | AUUUUCCACCAUGCUAUAA |
| siRNA 1558 | 1558 | UAUAGCAUGGUGGAAAAUA | 5194 | UAUUUUCCACCAUGCUAUA |
| siRNA 1559 | 1559 | AUAGCAUGGUGGAAAAUAA | 5195 | UUAUUUUCCACCAUGCUAU |
| siRNA 1560 | 1560 | UAGCAUGGUGGAAAAUAAG | 5196 | CUUAUUUUCCACCAUGCUA |
| siRNA 1561 | 1561 | AGCAUGGUGGAAAAUAAGG | 5197 | CCUUAUUUUCCACCAUGCU |
| siRNA 1562 | 1562 | GCAUGGUGGAAAAUAAGGU | 5198 | ACCUUAUUUUCCACCAUGC |
| siRNA 1563 | 1563 | CAUGGUGGAAAAUAAGGUU | 5199 | AACCUUAUUUUCCACCAUG |
| siRNA 1564 | 1564 | AUGGUGGAAAAUAAGGUUC | 5200 | GAACCUUAUUUUCCACCAU |
| siRNA 1565 | 1565 | UGGUGGAAAAUAAGGUUCA | 5201 | UGAACCUUAUUUUCCACCA |
| siRNA 1566 | 1566 | GGUGGAAAAUAAGGUUCAG | 5202 | CUGAACCUUAUUUUCCACC |
| siRNA 1567 | 1567 | GUGGAAAAUAAGGUUCAGA | 5203 | UCUGAACCUUAUUUUCCAC |
| siRNA 1568 | 1568 | UGGAAAAUAAGGUUCAGAU | 5204 | AUCUGAACCUUAUUUUCCA |
| siRNA 1569 | 1569 | GGAAAAUAAGGUUCAGAUG | 5205 | CAUCUGAACCUUAUUUUCC |
| siRNA 1570 | 1570 | GAAAAUAAGGUUCAGAUGC | 5206 | GCAUCUGAACCUUAUUUUC |
| siRNA 1571 | 1571 | AAAAUAAGGUUCAGAUGCA | 5207 | UGCAUCUGAACCUUAUUUU |
| siRNA 1572 | 1572 | AAAUAAGGUUCAGAUGCAG | 5208 | CUGCAUCUGAACCUUAUUU |
| siRNA 1573 | 1573 | AAUAAGGUUCAGAUGCAGA | 5209 | UCUGCAUCUGAACCUUAUU |
| siRNA 1574 | 1574 | AUAAGGUUCAGAUGCAGAA | 5210 | UUCUGCAUCUGAACCUUAU |
| siRNA 1575 | 1575 | UAAGGUUCAGAUGCAGAAG | 5211 | CUUCUGCAUCUGAACCUUA |
| siRNA 1576 | 1576 | AAGGUUCAGAUGCAGAAGA | 5212 | UCUUCUGCAUCUGAACCUU |
| siRNA 1577 | 1577 | AGGUUCAGAUGCAGAAGAA | 5213 | UUCUUCUGCAUCUGAACCU |
| siRNA 1578 | 1578 | GGUUCAGAUGCAGAAGAAU | 5214 | AUUCUUCUGCAUCUGAACC |
| siRNA 1579 | 1579 | GUUCAGAUGCAGAAGAAUG | 5215 | CAUUCUUCUGCAUCUGAAC |
| siRNA 1580 | 1580 | UUCAGAUGCAGAAGAAUGG | 5216 | CCAUUCUUCUGCAUCUGAA |
| siRNA 1581 | 1581 | UCAGAUGCAGAAGAAUGGC | 5217 | GCCAUUCUUCUGCAUCUGA |
| siRNA 1582 | 1582 | CAGAUGCAGAAGAAUGGCU | 5218 | AGCCAUUCUUCUGCAUCUG |
| siRNA 1583 | 1583 | AGAUGCAGAAGAAUGGCUA | 5219 | UAGCCAUUCUUCUGCAUCU |
| siRNA 1584 | 1584 | GAUGCAGAAGAAUGGCUAA | 5220 | UUAGCCAUUCUUCUGCAUC |
| siRNA 1585 | 1585 | AUGCAGAAGAAUGGCUAAA | 5221 | UUUAGCCAUUCUUCUGCAU |
| siRNA 1586 | 1586 | UGCAGAAGAAUGGCUAAAA | 5222 | UUUUAGCCAUUCUUCUGCA |
| siRNA 1587 | 1587 | GCAGAAGAAUGGCUAAAAU | 5223 | AUUUUAGCCAUUCUUCUGC |
| siRNA 1588 | 1588 | CAGAAGAAUGGCUAAAAUA | 5224 | UAUUUUAGCCAUUCUUCUG |
| siRNA 1589 | 1589 | AGAAGAAUGGCUAAAAUAA | 5225 | UUAUUUUAGCCAUUCUUCU |
| siRNA 1590 | 1590 | GAAGAAUGGCUAAAAUAAG | 5226 | CUUAUUUUAGCCAUUCUUC |
| siRNA 1591 | 1591 | AAGAAUGGCUAAAAUAAGA | 5227 | UCUUAUUUUAGCCAUUCUU |
| siRNA 1592 | 1592 | AGAAUGGCUAAAAUAAGAA | 5228 | UUCUUAUUUUAGCCAUUCU |
| siRNA 1593 | 1593 | GAAUGGCUAAAAUAAGAAA | 5229 | UUUCUUAUUUUAGCCAUUC |
| siRNA 1594 | 1594 | AAUGGCUAAAAUAAGAAAC | 5230 | GUUUCUUAUUUUAGCCAUU |
| siRNA 1595 | 1595 | AUGGCUAAAAUAAGAAACG | 5231 | CGUUUCUUAUUUUAGCCAU |
| siRNA 1596 | 1596 | UGGCUAAAAUAAGAAACGU | 5232 | ACGUUUCUUAUUUUAGCCA |
| siRNA 1597 | 1597 | GGCUAAAAUAAGAAACGUG | 5233 | CACGUUUCUUAUUUUAGCC |
| siRNA 1598 | 1598 | GCUAAAAUAAGAAACGUGA | 5234 | UCACGUUUCUUAUUUUAGC |
| siRNA 1599 | 1599 | CUAAAAUAAGAAACGUGAU | 5235 | AUCACGUUUCUUAUUUUAG |
| siRNA 1600 | 1600 | UAAAAUAAGAAACGUGAUA | 5236 | UAUCACGUUUCUUAUUUUA |
| siRNA 1601 | 1601 | AAAAUAAGAAACGUGAUAA | 5237 | UUAUCACGUUUCUUAUUUU |
| siRNA 1602 | 1602 | AAAUAAGAAACGUGAUAAG | 5238 | CUUAUCACGUUUCUUAUUU |
| siRNA 1603 | 1603 | AAUAAGAAACGUGAUAAGA | 5239 | UCUUAUCACGUUUCUUAUU |
| siRNA 1604 | 1604 | AUAAGAAACGUGAUAAGAA | 5240 | UUCUUAUCACGUUUCUUAU |
| siRNA 1605 | 1605 | UAAGAAACGUGAUAAGAAU | 5241 | AUUCUUAUCACGUUUCUUA |
| siRNA 1606 | 1606 | AAGAAACGUGAUAAGAAUA | 5242 | UAUUCUUAUCACGUUUCUU |
| siRNA 1607 | 1607 | AGAAACGUGAUAAGAAUAU | 5243 | AUAUUCUUAUCACGUUUCU |
| siRNA 1608 | 1608 | GAAACGUGAUAAGAAUAUA | 5244 | UAUAUUCUUAUCACGUUUC |
| siRNA 1609 | 1609 | AAACGUGAUAAGAAUAUAG | 5245 | CUAUAUUCUUAUCACGUUU |
| siRNA 1610 | 1610 | AACGUGAUAAGAAUAUAGA | 5246 | UCUAUAUUCUUAUCACGUU |
| siRNA 1611 | 1611 | ACGUGAUAAGAAUAUAGAU | 5247 | AUCUAUAUUCUUAUCACGU |
| siRNA 1612 | 1612 | CGUGAUAAGAAUAUAGAUG | 5248 | CAUCUAUAUUCUUAUCACG |
| siRNA 1613 | 1613 | GUGAUAAGAAUAUAGAUGA | 5249 | UCAUCUAUAUUCUUAUCAC |
| siRNA 1614 | 1614 | UGAUAAGAAUAUAGAUGAU | 5250 | AUCAUCUAUAUUCUUAUCA |
| siRNA 1615 | 1615 | GAUAAGAAUAUAGAUGAUC | 5251 | GAUCAUCUAUAUUCUUAUC |
| siRNA 1616 | 1616 | AUAAGAAUAUAGAUGAUCA | 5252 | UGAUCAUCUAUAUUCUUAU |
| siRNA 1617 | 1617 | UAAGAAUAUAGAUGAUCAC | 5253 | GUGAUCAUCUAUAUUCUUA |
| siRNA 1618 | 1618 | AAGAAUAUAGAUGAUCACA | 5254 | UGUGAUCAUCUAUAUUCUU |
| siRNA 1619 | 1619 | AGAAUAUAGAUGAUCACAA | 5255 | UUGUGAUCAUCUAUAUUCU |
| siRNA 1620 | 1620 | GAAUAUAGAUGAUCACAAA | 5256 | UUUGUGAUCAUCUAUAUUC |
| siRNA 1621 | 1621 | AAUAUAGAUGAUCACAAAA | 5257 | UUUUGUGAUCAUCUAUAUU |
| siRNA 1622 | 1622 | AUAUAGAUGAUCACAAAAA | 5258 | UUUUUGUGAUCAUCUAUAU |
| siRNA 1623 | 1623 | UAUAGAUGAUCACAAAAAG | 5259 | CUUUUUGUGAUCAUCUAUA |
| siRNA 1624 | 1624 | AUAGAUGAUCACAAAAAGG | 5260 | CCUUUUUGUGAUCAUCUAU |
| siRNA 1625 | 1625 | UAGAUGAUCACAAAAAGGG | 5261 | CCCUUUUUGUGAUCAUCUA |
| siRNA 1626 | 1626 | AGAUGAUCACAAAAAGGGA | 5262 | UCCCUUUUUGUGAUCAUCU |
| siRNA 1627 | 1627 | GAUGAUCACAAAAAGGGAG | 5263 | CUCCCUUUUUGUGAUCAUC |
| siRNA 1628 | 1628 | AUGAUCACAAAAAGGGAGA | 5264 | UCUCCCUUUUUGUGAUCAU |
| siRNA 1629 | 1629 | UGAUCACAAAAAGGGAGAA | 5265 | UUCUCCCUUUUUGUGAUCA |
| siRNA 1630 | 1630 | GAUCACAAAAAGGGAGAAA | 5266 | UUUCUCCCUUUUUGUGAUC |
| siRNA 1631 | 1631 | AUCACAAAAAGGGAGAAAG | 5267 | CUUUCUCCCUUUUUGUGAU |
| siRNA 1632 | 1632 | UCACAAAAAGGGAGAAAGA | 5268 | UCUUUCUCCCUUUUUGUGA |
| siRNA 1633 | 1633 | CACAAAAAGGGAGAAAGAA | 5269 | UUCUUUCUCCCUUUUUGUG |
| siRNA 1634 | 1634 | ACAAAAAGGGAGAAAGAAA | 5270 | UUUCUUUCUCCCUUUUUGU |
| siRNA 1635 | 1635 | CAAAAAGGGAGAAAGAAAA | 5271 | UUUUCUUUCUCCCUUUUUG |
| siRNA 1636 | 1636 | AAAAAGGGAGAAAGAAAAC | 5272 | GUUUUCUUUCUCCCUUUUU |
| siRNA 1637 | 1637 | AAAAGGGAGAAAGAAAACA | 5273 | UGUUUUCUUUCUCCCUUUU |
| siRNA 1638 | 1638 | AAAGGGAGAAAGAAAACAU | 5274 | AUGUUUUCUUUCUCCCUUU |
| siRNA 1639 | 1639 | AAGGGAGAAAGAAAACAUG | 5275 | CAUGUUUUCUUUCUCCCUU |
| siRNA 1640 | 1640 | AGGGAGAAAGAAAACAUGA | 5276 | UCAUGUUUUCUUUCUCCCU |
| siRNA 1641 | 1641 | GGGAGAAAGAAAACAUGAA | 5277 | UUCAUGUUUUCUUUCUCCC |
| siRNA 1642 | 1642 | GGAGAAAGAAAACAUGAAC | 5278 | GUUCAUGUUUUCUUUCUCC |
| siRNA 1643 | 1643 | GAGAAAGAAAACAUGAACU | 5279 | AGUUCAUGUUUUCUUUCUC |
| siRNA 1644 | 1644 | AGAAAGAAAACAUGAACUG | 5280 | CAGUUCAUGUUUUCUUUCU |
| siRNA 1645 | 1645 | GAAAGAAAACAUGAACUGA | 5281 | UCAGUUCAUGUUUUCUUUC |
| siRNA 1646 | 1646 | AAAGAAAACAUGAACUGAA | 5282 | UUCAGUUCAUGUUUUCUUU |
| siRNA 1647 | 1647 | AAGAAAACAUGAACUGAAU | 5283 | AUUCAGUUCAUGUUUUCUU |
| siRNA 1648 | 1648 | AGAAAACAUGAACUGAAUA | 5284 | UAUUCAGUUCAUGUUUUCU |
| siRNA 1649 | 1649 | GAAAACAUGAACUGAAUAG | 5285 | CUAUUCAGUUCAUGUUUUC |
| siRNA 1650 | 1650 | AAAACAUGAACUGAAUAGA | 5286 | UCUAUUCAGUUCAUGUUUU |
| siRNA 1651 | 1651 | AAACAUGAACUGAAUAGAU | 5287 | AUCUAUUCAGUUCAUGUUU |
| siRNA 1652 | 1652 | AACAUGAACUGAAUAGAUU | 5288 | AAUCUAUUCAGUUCAUGUU |
| siRNA 1653 | 1653 | ACAUGAACUGAAUAGAUUA | 5289 | UAAUCUAUUCAGUUCAUGU |
| siRNA 1654 | 1654 | CAUGAACUGAAUAGAUUAG | 5290 | CUAAUCUAUUCAGUUCAUG |
| siRNA 1655 | 1655 | AUGAACUGAAUAGAUUAGA | 5291 | UCUAAUCUAUUCAGUUCAU |
| siRNA 1656 | 1656 | UGAACUGAAUAGAUUAGAA | 5292 | UUCUAAUCUAUUCAGUUCA |
| siRNA 1657 | 1657 | GAACUGAAUAGAUUAGAAU | 5293 | AUUCUAAUCUAUUCAGUUC |
| siRNA 1658 | 1658 | AACUGAAUAGAUUAGAAUG | 5294 | CAUUCUAAUCUAUUCAGUU |
| siRNA 1659 | 1659 | ACUGAAUAGAUUAGAAUGG | 5295 | CCAUUCUAAUCUAUUCAGU |
| siRNA 1660 | 1660 | CUGAAUAGAUUAGAAUGGG | 5296 | CCCAUUCUAAUCUAUUCAG |
| siRNA 1661 | 1661 | UGAAUAGAUUAGAAUGGGU | 5297 | ACCCAUUCUAAUCUAUUCA |
| siRNA 1662 | 1662 | GAAUAGAUUAGAAUGGGUG | 5298 | CACCCAUUCUAAUCUAUUC |
| siRNA 1663 | 1663 | AAUAGAUUAGAAUGGGUGA | 5299 | UCACCCAUUCUAAUCUAUU |
| siRNA 1664 | 1664 | AUAGAUUAGAAUGGGUGAC | 5300 | GUCACCCAUUCUAAUCUAU |
| siRNA 1665 | 1665 | UAGAUUAGAAUGGGUGACA | 5301 | UGUCACCCAUUCUAAUCUA |
| siRNA 1666 | 1666 | AGAUUAGAAUGGGUGACAA | 5302 | UUGUCACCCAUUCUAAUCU |
| siRNA 1667 | 1667 | GAUUAGAAUGGGUGACAAA | 5303 | UUUGUCACCCAUUCUAAUC |
| siRNA 1668 | 1668 | AUUAGAAUGGGUGACAAAU | 5304 | AUUUGUCACCCAUUCUAAU |
| siRNA 1669 | 1669 | UUAGAAUGGGUGACAAAUG | 5305 | CAUUUGUCACCCAUUCUAA |
| siRNA 1670 | 1670 | UAGAAUGGGUGACAAAUGC | 5306 | GCAUUUGUCACCCAUUCUA |
| siRNA 1671 | 1671 | AGAAUGGGUGACAAAUGCA | 5307 | UGCAUUUGUCACCCAUUCU |
| siRNA 1672 | 1672 | GAAUGGGUGACAAAUGCAG | 5308 | CUGCAUUUGUCACCCAUUC |
| siRNA 1673 | 1673 | AAUGGGUGACAAAUGCAGU | 5309 | ACUGCAUUUGUCACCCAUU |
| siRNA 1674 | 1674 | AUGGGUGACAAAUGCAGUG | 5310 | CACUGCAUUUGUCACCCAU |
| siRNA 1675 | 1675 | UGGGUGACAAAUGCAGUGC | 5311 | GCACUGCAUUUGUCACCCA |
| siRNA 1676 | 1676 | GGGUGACAAAUGCAGUGCA | 5312 | UGCACUGCAUUUGUCACCC |
| siRNA 1677 | 1677 | GGUGACAAAUGCAGUGCAG | 5313 | CUGCACUGCAUUUGUCACC |
| siRNA 1678 | 1678 | GUGACAAAUGCAGUGCAGC | 5314 | GCUGCACUGCAUUUGUCAC |
| siRNA 1679 | 1679 | UGACAAAUGCAGUGCAGCC | 5315 | GGCUGCACUGCAUUUGUCA |
| siRNA 1680 | 1680 | GACAAAUGCAGUGCAGCCA | 5316 | UGGCUGCACUGCAUUUGUC |
| siRNA 1681 | 1681 | ACAAAUGCAGUGCAGCCAG | 5317 | CUGGCUGCACUGCAUUUGU |
| siRNA 1682 | 1682 | CAAAUGCAGUGCAGCCAGU | 5318 | ACUGGCUGCACUGCAUUUG |
| siRNA 1683 | 1683 | AAAUGCAGUGCAGCCAGUG | 5319 | CACUGGCUGCACUGCAUUU |
| siRNA 1684 | 1684 | AAUGCAGUGCAGCCAGUGU | 5320 | ACACUGGCUGCACUGCAUU |
| siRNA 1685 | 1685 | AUGCAGUGCAGCCAGUGUU | 5321 | AACACUGGCUGCACUGCAU |
| siRNA 1686 | 1686 | UGCAGUGCAGCCAGUGUUU | 5322 | AAACACUGGCUGCACUGCA |
| siRNA 1687 | 1687 | GCAGUGCAGCCAGUGUUUC | 5323 | GAAACACUGGCUGCACUGC |
| siRNA 1688 | 1688 | CAGUGCAGCCAGUGUUUCC | 5324 | GGAAACACUGGCUGCACUG |
| siRNA 1689 | 1689 | AGUGCAGCCAGUGUUUCCA | 5325 | UGGAAACACUGGCUGCACU |
| siRNA 1690 | 1690 | GUGCAGCCAGUGUUUCCAU | 5326 | AUGGAAACACUGGCUGCAC |
| siRNA 1691 | 1691 | UGCAGCCAGUGUUUCCAUU | 5327 | AAUGGAAACACUGGCUGCA |
| siRNA 1692 | 1692 | GCAGCCAGUGUUUCCAUUA | 5328 | UAAUGGAAACACUGGCUGC |
| siRNA 1693 | 1693 | CAGCCAGUGUUUCCAUUAU | 5329 | AUAAUGGAAACACUGGCUG |
| siRNA 1694 | 1694 | AGCCAGUGUUUCCAUUAUG | 5330 | CAUAAUGGAAACACUGGCU |
| siRNA 1695 | 1695 | GCCAGUGUUUCCAUUAUGC | 5331 | GCAUAAUGGAAACACUGGC |
| siRNA 1696 | 1696 | CCAGUGUUUCCAUUAUGCA | 5332 | UGCAUAAUGGAAACACUGG |
| siRNA 1697 | 1697 | CAGUGUUUCCAUUAUGCAA | 5333 | UUGCAUAAUGGAAACACUG |
| siRNA 1698 | 1698 | AGUGUUUCCAUUAUGCAAC | 5334 | GUUGCAUAAUGGAAACACU |
| siRNA 1699 | 1699 | GUGUUUCCAUUAUGCAACU | 5335 | AGUUGCAUAAUGGAAACAC |
| siRNA 1700 | 1700 | UGUUUCCAUUAUGCAACUU | 5336 | AAGUUGCAUAAUGGAAACA |
| siRNA 1701 | 1701 | GUUUCCAUUAUGCAACUUG | 5337 | CAAGUUGCAUAAUGGAAAC |
| siRNA 1702 | 1702 | UUUCCAUUAUGCAACUUGU | 5338 | ACAAGUUGCAUAAUGGAAA |
| siRNA 1703 | 1703 | UUCCAUUAUGCAACUUGUC | 5339 | GACAAGUUGCAUAAUGGAA |
| siRNA 1704 | 1704 | UCCAUUAUGCAACUUGUCU | 5340 | AGACAAGUUGCAUAAUGGA |
| siRNA 1705 | 1705 | CCAUUAUGCAACUUGUCUA | 5341 | UAGACAAGUUGCAUAAUGG |
| siRNA 1706 | 1706 | CAUUAUGCAACUUGUCUAU | 5342 | AUAGACAAGUUGCAUAAUG |
| siRNA 1707 | 1707 | AUUAUGCAACUUGUCUAUG | 5343 | CAUAGACAAGUUGCAUAAU |
| siRNA 1708 | 1708 | UUAUGCAACUUGUCUAUGU | 5344 | ACAUAGACAAGUUGCAUAA |
| siRNA 1709 | 1709 | UAUGCAACUUGUCUAUGUA | 5345 | UACAUAGACAAGUUGCAUA |
| siRNA 1710 | 1710 | AUGCAACUUGUCUAUGUAA | 5346 | UUACAUAGACAAGUUGCAU |
| siRNA 1711 | 1711 | UGCAACUUGUCUAUGUAAA | 5347 | UUUACAUAGACAAGUUGCA |
| siRNA 1712 | 1712 | GCAACUUGUCUAUGUAAAU | 5348 | AUUUACAUAGACAAGUUGC |
| siRNA 1713 | 1713 | CAACUUGUCUAUGUAAAUA | 5349 | UAUUUACAUAGACAAGUUG |
| siRNA 1714 | 1714 | AACUUGUCUAUGUAAAUAA | 5350 | UUAUUUACAUAGACAAGUU |
| siRNA 1715 | 1715 | ACUUGUCUAUGUAAAUAAU | 5351 | AUUAUUUACAUAGACAAGU |
| siRNA 1716 | 1716 | CUUGUCUAUGUAAAUAAUG | 5352 | CAUUAUUUACAUAGACAAG |
| siRNA 1717 | 1717 | UUGUCUAUGUAAAUAAUGU | 5353 | ACAUUAUUUACAUAGACAA |
| siRNA 1718 | 1718 | UGUCUAUGUAAAUAAUGUA | 5354 | UACAUUAUUUACAUAGACA |
| siRNA 1719 | 1719 | GUCUAUGUAAAUAAUGUAC | 5355 | GUACAUUAUUUACAUAGAC |
| siRNA 1720 | 1720 | UCUAUGUAAAUAAUGUACA | 5356 | UGUACAUUAUUUACAUAGA |
| siRNA 1721 | 1721 | CUAUGUAAAUAAUGUACAC | 5357 | GUGUACAUUAUUUACAUAG |
| siRNA 1722 | 1722 | UAUGUAAAUAAUGUACACA | 5358 | UGUGUACAUUAUUUACAUA |
| siRNA 1723 | 1723 | AUGUAAAUAAUGUACACAU | 5359 | AUGUGUACAUUAUUUACAU |
| siRNA 1724 | 1724 | UGUAAAUAAUGUACACAUU | 5360 | AAUGUGUACAUUAUUUACA |
| siRNA 1725 | 1725 | GUAAAUAAUGUACACAUUU | 5361 | AAAUGUGUACAUUAUUUAC |
| siRNA 1726 | 1726 | UAAAUAAUGUACACAUUUG | 5362 | CAAAUGUGUACAUUAUUUA |
| siRNA 1727 | 1727 | AAAUAAUGUACACAUUUGU | 5363 | ACAAAUGUGUACAUUAUUU |
| siRNA 1728 | 1728 | AAUAAUGUACACAUUUGUG | 5364 | CACAAAUGUGUACAUUAUU |
| siRNA 1729 | 1729 | AUAAUGUACACAUUUGUGG | 5365 | CCACAAAUGUGUACAUUAU |
| siRNA 1730 | 1730 | UAAUGUACACAUUUGUGGA | 5366 | UCCACAAAUGUGUACAUUA |
| siRNA 1731 | 1731 | AAUGUACACAUUUGUGGAA | 5367 | UUCCACAAAUGUGUACAUU |
| siRNA 1732 | 1732 | AUGUACACAUUUGUGGAAA | 5368 | UUUCCACAAAUGUGUACAU |
| siRNA 1733 | 1733 | UGUACACAUUUGUGGAAAA | 5369 | UUUUCCACAAAUGUGUACA |
| siRNA 1734 | 1734 | GUACACAUUUGUGGAAAAU | 5370 | AUUUUCCACAAAUGUGUAC |
| siRNA 1735 | 1735 | UACACAUUUGUGGAAAAUG | 5371 | CAUUUUCCACAAAUGUGUA |
| siRNA 1736 | 1736 | ACACAUUUGUGGAAAAUGC | 5372 | GCAUUUUCCACAAAUGUGU |
| siRNA 1737 | 1737 | CACAUUUGUGGAAAAUGCU | 5373 | AGCAUUUUCCACAAAUGUG |
| siRNA 1738 | 1738 | ACAUUUGUGGAAAAUGCUA | 5374 | UAGCAUUUUCCACAAAUGU |
| siRNA 1739 | 1739 | CAUUUGUGGAAAAUGCUAU | 5375 | AUAGCAUUUUCCACAAAUG |
| siRNA 1740 | 1740 | AUUUGUGGAAAAUGCUAUU | 5376 | AAUAGCAUUUUCCACAAAU |
| siRNA 1741 | 1741 | UUUGUGGAAAAUGCUAUUA | 5377 | UAAUAGCAUUUUCCACAAA |
| siRNA 1742 | 1742 | UUGUGGAAAAUGCUAUUAU | 5378 | AUAAUAGCAUUUUCCACAA |
| siRNA 1743 | 1743 | UGUGGAAAAUGCUAUUAUU | 5379 | AAUAAUAGCAUUUUCCACA |
| siRNA 1744 | 1744 | GUGGAAAAUGCUAUUAUUA | 5380 | UAAUAAUAGCAUUUUCCAC |
| siRNA 1745 | 1745 | UGGAAAAUGCUAUUAUUAA | 5381 | UUAAUAAUAGCAUUUUCCA |
| siRNA 1746 | 1746 | GGAAAAUGCUAUUAUUAAG | 5382 | CUUAAUAAUAGCAUUUUCC |
| siRNA 1747 | 1747 | GAAAAUGCUAUUAUUAAGA | 5383 | UCUUAAUAAUAGCAUUUUC |
| siRNA 1748 | 1748 | AAAAUGCUAUUAUUAAGAG | 5384 | CUCUUAAUAAUAGCAUUUU |
| siRNA 1749 | 1749 | AAAUGCUAUUAUUAAGAGA | 5385 | UCUCUUAAUAAUAGCAUUU |
| siRNA 1750 | 1750 | AAUGCUAUUAUUAAGAGAA | 5386 | UUCUCUUAAUAAUAGCAUU |
| siRNA 1751 | 1751 | AUGCUAUUAUUAAGAGAAC | 5387 | GUUCUCUUAAUAAUAGCAU |
| siRNA 1752 | 1752 | UGCUAUUAUUAAGAGAACA | 5388 | UGUUCUCUUAAUAAUAGCA |
| siRNA 1753 | 1753 | GCUAUUAUUAAGAGAACAA | 5389 | UUGUUCUCUUAAUAAUAGC |
| siRNA 1754 | 1754 | CUAUUAUUAAGAGAACAAG | 5390 | CUUGUUCUCUUAAUAAUAG |
| siRNA 1755 | 1755 | UAUUAUUAAGAGAACAAGC | 5391 | GCUUGUUCUCUUAAUAAUA |
| siRNA 1756 | 1756 | AUUAUUAAGAGAACAAGCA | 5392 | UGCUUGUUCUCUUAAUAAU |
| siRNA 1757 | 1757 | UUAUUAAGAGAACAAGCAC | 5393 | GUGCUUGUUCUCUUAAUAA |
| siRNA 1758 | 1758 | UAUUAAGAGAACAAGCACA | 5394 | UGUGCUUGUUCUCUUAAUA |
| siRNA 1759 | 1759 | AUUAAGAGAACAAGCACAC | 5395 | GUGUGCUUGUUCUCUUAAU |
| siRNA 1760 | 1760 | UUAAGAGAACAAGCACACA | 5396 | UGUGUGCUUGUUCUCUUAA |
| siRNA 1761 | 1761 | UAAGAGAACAAGCACACAG | 5397 | CUGUGUGCUUGUUCUCUUA |
| siRNA 1762 | 1762 | AAGAGAACAAGCACACAGU | 5398 | ACUGUGUGCUUGUUCUCUU |
| siRNA 1763 | 1763 | AGAGAACAAGCACACAGUG | 5399 | CACUGUGUGCUUGUUCUCU |
| siRNA 1764 | 1764 | GAGAACAAGCACACAGUGG | 5400 | CCACUGUGUGCUUGUUCUC |
| siRNA 1765 | 1765 | AGAACAAGCACACAGUGGA | 5401 | UCCACUGUGUGCUUGUUCU |
| siRNA 1766 | 1766 | GAACAAGCACACAGUGGAA | 5402 | UUCCACUGUGUGCUUGUUC |
| siRNA 1767 | 1767 | AACAAGCACACAGUGGAAA | 5403 | UUUCCACUGUGUGCUUGUU |
| siRNA 1768 | 1768 | ACAAGCACACAGUGGAAAU | 5404 | AUUUCCACUGUGUGCUUGU |
| siRNA 1769 | 1769 | CAAGCACACAGUGGAAAUU | 5405 | AAUUUCCACUGUGUGCUUG |
| siRNA 1770 | 1770 | AAGCACACAGUGGAAAUUA | 5406 | UAAUUUCCACUGUGUGCUU |
| siRNA 1771 | 1771 | AGCACACAGUGGAAAUUAC | 5407 | GUAAUUUCCACUGUGUGCU |
| siRNA 1772 | 1772 | GCACACAGUGGAAAUUACU | 5408 | AGUAAUUUCCACUGUGUGC |
| siRNA 1773 | 1773 | CACACAGUGGAAAUUACUG | 5409 | CAGUAAUUUCCACUGUGUG |
| siRNA 1774 | 1774 | ACACAGUGGAAAUUACUGA | 5410 | UCAGUAAUUUCCACUGUGU |
| siRNA 1775 | 1775 | CACAGUGGAAAUUACUGAU | 5411 | AUCAGUAAUUUCCACUGUG |
| siRNA 1776 | 1776 | ACAGUGGAAAUUACUGAUG | 5412 | CAUCAGUAAUUUCCACUGU |
| siRNA 1777 | 1777 | CAGUGGAAAUUACUGAUGA | 5413 | UCAUCAGUAAUUUCCACUG |
| siRNA 1778 | 1778 | AGUGGAAAUUACUGAUGAG | 5414 | CUCAUCAGUAAUUUCCACU |
| siRNA 1779 | 1779 | GUGGAAAUUACUGAUGAGU | 5415 | ACUCAUCAGUAAUUUCCAC |
| siRNA 1780 | 1780 | UGGAAAUUACUGAUGAGUA | 5416 | UACUCAUCAGUAAUUUCCA |
| siRNA 1781 | 1781 | GGAAAUUACUGAUGAGUAG | 5417 | CUACUCAUCAGUAAUUUCC |
| siRNA 1782 | 1782 | GAAAUUACUGAUGAGUAGC | 5418 | GCUACUCAUCAGUAAUUUC |
| siRNA 1783 | 1783 | AAAUUACUGAUGAGUAGCA | 5419 | UGCUACUCAUCAGUAAUUU |
| siRNA 1784 | 1784 | AAUUACUGAUGAGUAGCAU | 5420 | AUGCUACUCAUCAGUAAUU |
| siRNA 1785 | 1785 | AUUACUGAUGAGUAGCAUG | 5421 | CAUGCUACUCAUCAGUAAU |
| siRNA 1786 | 1786 | UUACUGAUGAGUAGCAUGU | 5422 | ACAUGCUACUCAUCAGUAA |
| siRNA 1787 | 1787 | UACUGAUGAGUAGCAUGUG | 5423 | CACAUGCUACUCAUCAGUA |
| siRNA 1788 | 1788 | ACUGAUGAGUAGCAUGUGA | 5424 | UCACAUGCUACUCAUCAGU |
| siRNA 1789 | 1789 | CUGAUGAGUAGCAUGUGAC | 5425 | GUCACAUGCUACUCAUCAG |
| siRNA 1790 | 1790 | UGAUGAGUAGCAUGUGACU | 5426 | AGUCACAUGCUACUCAUCA |
| siRNA 1791 | 1791 | GAUGAGUAGCAUGUGACUU | 5427 | AAGUCACAUGCUACUCAUC |
| siRNA 1792 | 1792 | AUGAGUAGCAUGUGACUUU | 5428 | AAAGUCACAUGCUACUCAU |
| siRNA 1793 | 1793 | UGAGUAGCAUGUGACUUUC | 5429 | GAAAGUCACAUGCUACUCA |
| siRNA 1794 | 1794 | GAGUAGCAUGUGACUUUCC | 5430 | GGAAAGUCACAUGCUACUC |
| siRNA 1795 | 1795 | AGUAGCAUGUGACUUUCCA | 5431 | UGGAAAGUCACAUGCUACU |
| siRNA 1796 | 1796 | GUAGCAUGUGACUUUCCAA | 5432 | UUGGAAAGUCACAUGCUAC |
| siRNA 1797 | 1797 | UAGCAUGUGACUUUCCAAG | 5433 | CUUGGAAAGUCACAUGCUA |
| siRNA 1798 | 1798 | AGCAUGUGACUUUCCAAGA | 5434 | UCUUGGAAAGUCACAUGCU |
| siRNA 1799 | 1799 | GCAUGUGACUUUCCAAGAG | 5435 | CUCUUGGAAAGUCACAUGC |
| siRNA 1800 | 1800 | CAUGUGACUUUCCAAGAGU | 5436 | ACUCUUGGAAAGUCACAUG |
| siRNA 1801 | 1801 | AUGUGACUUUCCAAGAGUU | 5437 | AACUCUUGGAAAGUCACAU |
| siRNA 1802 | 1802 | UGUGACUUUCCAAGAGUUU | 5438 | AAACUCUUGGAAAGUCACA |
| siRNA 1803 | 1803 | GUGACUUUCCAAGAGUUUA | 5439 | UAAACUCUUGGAAAGUCAC |
| siRNA 1804 | 1804 | UGACUUUCCAAGAGUUUAG | 5440 | CUAAACUCUUGGAAAGUCA |
| siRNA 1805 | 1805 | GACUUUCCAAGAGUUUAGG | 5441 | CCUAAACUCUUGGAAAGUC |
| siRNA 1806 | 1806 | ACUUUCCAAGAGUUUAGGU | 5442 | ACCUAAACUCUUGGAAAGU |
| siRNA 1807 | 1807 | CUUUCCAAGAGUUUAGGUU | 5443 | AACCUAAACUCUUGGAAAG |
| siRNA 1808 | 1808 | UUUCCAAGAGUUUAGGUUG | 5444 | CAACCUAAACUCUUGGAAA |
| siRNA 1809 | 1809 | UUCCAAGAGUUUAGGUUGU | 5445 | ACAACCUAAACUCUUGGAA |
| siRNA 1810 | 1810 | UCCAAGAGUUUAGGUUGUG | 5446 | CACAACCUAAACUCUUGGA |
| siRNA 1811 | 1811 | CCAAGAGUUUAGGUUGUGC | 5447 | GCACAACCUAAACUCUUGG |
| siRNA 1812 | 1812 | CAAGAGUUUAGGUUGUGCU | 5448 | AGCACAACCUAAACUCUUG |
| siRNA 1813 | 1813 | AAGAGUUUAGGUUGUGCUG | 5449 | CAGCACAACCUAAACUCUU |
| siRNA 1814 | 1814 | AGAGUUUAGGUUGUGCUGG | 5450 | CCAGCACAACCUAAACUCU |
| siRNA 1815 | 1815 | GAGUUUAGGUUGUGCUGGA | 5451 | UCCAGCACAACCUAAACUC |
| siRNA 1816 | 1816 | AGUUUAGGUUGUGCUGGAG | 5452 | CUCCAGCACAACCUAAACU |
| siRNA 1817 | 1817 | GUUUAGGUUGUGCUGGAGG | 5453 | CCUCCAGCACAACCUAAAC |
| siRNA 1818 | 1818 | UUUAGGUUGUGCUGGAGGA | 5454 | UCCUCCAGCACAACCUAAA |
| siRNA 1819 | 1819 | UUAGGUUGUGCUGGAGGAG | 5455 | CUCCUCCAGCACAACCUAA |
| siRNA 1820 | 1820 | UAGGUUGUGCUGGAGGAGA | 5456 | UCUCCUCCAGCACAACCUA |
| siRNA 1821 | 1821 | AGGUUGUGCUGGAGGAGAG | 5457 | CUCUCCUCCAGCACAACCU |
| siRNA 1822 | 1822 | GGUUGUGCUGGAGGAGAGG | 5458 | CCUCUCCUCCAGCACAACC |
| siRNA 1823 | 1823 | GUUGUGCUGGAGGAGAGGU | 5459 | ACCUCUCCUCCAGCACAAC |
| siRNA 1824 | 1824 | UUGUGCUGGAGGAGAGGUU | 5460 | AACCUCUCCUCCAGCACAA |
| siRNA 1825 | 1825 | UGUGCUGGAGGAGAGGUUU | 5461 | AAACCUCUCCUCCAGCACA |
| siRNA 1826 | 1826 | GUGCUGGAGGAGAGGUUUC | 5462 | GAAACCUCUCCUCCAGCAC |
| siRNA 1827 | 1827 | UGCUGGAGGAGAGGUUUCC | 5463 | GGAAACCUCUCCUCCAGCA |
| siRNA 1828 | 1828 | GCUGGAGGAGAGGUUUCCU | 5464 | AGGAAACCUCUCCUCCAGC |
| siRNA 1829 | 1829 | CUGGAGGAGAGGUUUCCUU | 5465 | AAGGAAACCUCUCCUCCAG |
| siRNA 1830 | 1830 | UGGAGGAGAGGUUUCCUUC | 5466 | GAAGGAAACCUCUCCUCCA |
| siRNA 1831 | 1831 | GGAGGAGAGGUUUCCUUCA | 5467 | UGAAGGAAACCUCUCCUCC |
| siRNA 1832 | 1832 | GAGGAGAGGUUUCCUUCAG | 5468 | CUGAAGGAAACCUCUCCUC |
| siRNA 1833 | 1833 | AGGAGAGGUUUCCUUCAGA | 5469 | UCUGAAGGAAACCUCUCCU |
| siRNA 1834 | 1834 | GGAGAGGUUUCCUUCAGAU | 5470 | AUCUGAAGGAAACCUCUCC |
| siRNA 1835 | 1835 | GAGAGGUUUCCUUCAGAUU | 5471 | AAUCUGAAGGAAACCUCUC |
| siRNA 1836 | 1836 | AGAGGUUUCCUUCAGAUUG | 5472 | CAAUCUGAAGGAAACCUCU |
| siRNA 1837 | 1837 | GAGGUUUCCUUCAGAUUGC | 5473 | GCAAUCUGAAGGAAACCUC |
| siRNA 1838 | 1838 | AGGUUUCCUUCAGAUUGCU | 5474 | AGCAAUCUGAAGGAAACCU |
| siRNA 1839 | 1839 | GGUUUCCUUCAGAUUGCUG | 5475 | CAGCAAUCUGAAGGAAACC |
| siRNA 1840 | 1840 | GUUUCCUUCAGAUUGCUGA | 5476 | UCAGCAAUCUGAAGGAAAC |
| siRNA 1841 | 1841 | UUUCCUUCAGAUUGCUGAU | 5477 | AUCAGCAAUCUGAAGGAAA |
| siRNA 1842 | 1842 | UUCCUUCAGAUUGCUGAUU | 5478 | AAUCAGCAAUCUGAAGGAA |
| siRNA 1843 | 1843 | UCCUUCAGAUUGCUGAUUG | 5479 | CAAUCAGCAAUCUGAAGGA |
| siRNA 1844 | 1844 | CCUUCAGAUUGCUGAUUGC | 5480 | GCAAUCAGCAAUCUGAAGG |
| siRNA 1845 | 1845 | CUUCAGAUUGCUGAUUGCU | 5481 | AGCAAUCAGCAAUCUGAAG |
| siRNA 1846 | 1846 | UUCAGAUUGCUGAUUGCUU | 5482 | AAGCAAUCAGCAAUCUGAA |
| siRNA 1847 | 1847 | UCAGAUUGCUGAUUGCUUA | 5483 | UAAGCAAUCAGCAAUCUGA |
| siRNA 1848 | 1848 | CAGAUUGCUGAUUGCUUAU | 5484 | AUAAGCAAUCAGCAAUCUG |
| siRNA 1849 | 1849 | AGAUUGCUGAUUGCUUAUA | 5485 | UAUAAGCAAUCAGCAAUCU |
| siRNA 1850 | 1850 | GAUUGCUGAUUGCUUAUAC | 5486 | GUAUAAGCAAUCAGCAAUC |
| siRNA 1851 | 1851 | AUUGCUGAUUGCUUAUACA | 5487 | UGUAUAAGCAAUCAGCAAU |
| siRNA 1852 | 1852 | UUGCUGAUUGCUUAUACAA | 5488 | UUGUAUAAGCAAUCAGCAA |
| siRNA 1853 | 1853 | UGCUGAUUGCUUAUACAAA | 5489 | UUUGUAUAAGCAAUCAGCA |
| siRNA 1854 | 1854 | GCUGAUUGCUUAUACAAAU | 5490 | AUUUGUAUAAGCAAUCAGC |
| siRNA 1855 | 1855 | CUGAUUGCUUAUACAAAUA | 5491 | UAUUUGUAUAAGCAAUCAG |
| siRNA 1856 | 1856 | UGAUUGCUUAUACAAAUAA | 5492 | UUAUUUGUAUAAGCAAUCA |
| siRNA 1857 | 1857 | GAUUGCUUAUACAAAUAAC | 5493 | GUUAUUUGUAUAAGCAAUC |
| siRNA 1858 | 1858 | AUUGCUUAUACAAAUAACC | 5494 | GGUUAUUUGUAUAAGCAAU |
| siRNA 1859 | 1859 | UUGCUUAUACAAAUAACCU | 5495 | AGGUUAUUUGUAUAAGCAA |
| siRNA 1860 | 1860 | UGCUUAUACAAAUAACCUA | 5496 | UAGGUUAUUUGUAUAAGCA |
| siRNA 1861 | 1861 | GCUUAUACAAAUAACCUAC | 5497 | GUAGGUUAUUUGUAUAAGC |
| siRNA 1862 | 1862 | CUUAUACAAAUAACCUACA | 5498 | UGUAGGUUAUUUGUAUAAG |
| siRNA 1863 | 1863 | UUAUACAAAUAACCUACAU | 5499 | AUGUAGGUUAUUUGUAUAA |
| siRNA 1864 | 1864 | UAUACAAAUAACCUACAUG | 5500 | CAUGUAGGUUAUUUGUAUA |
| siRNA 1865 | 1865 | AUACAAAUAACCUACAUGC | 5501 | GCAUGUAGGUUAUUUGUAU |
| siRNA 1866 | 1866 | UACAAAUAACCUACAUGCC | 5502 | GGCAUGUAGGUUAUUUGUA |
| siRNA 1867 | 1867 | ACAAAUAACCUACAUGCCA | 5503 | UGGCAUGUAGGUUAUUUGU |
| siRNA 1868 | 1868 | CAAAUAACCUACAUGCCAG | 5504 | CUGGCAUGUAGGUUAUUUG |
| siRNA 1869 | 1869 | AAAUAACCUACAUGCCAGA | 5505 | UCUGGCAUGUAGGUUAUUU |
| siRNA 1870 | 1870 | AAUAACCUACAUGCCAGAU | 5506 | AUCUGGCAUGUAGGUUAUU |
| siRNA 1871 | 1871 | AUAACCUACAUGCCAGAUU | 5507 | AAUCUGGCAUGUAGGUUAU |
| siRNA 1872 | 1872 | UAACCUACAUGCCAGAUUU | 5508 | AAAUCUGGCAUGUAGGUUA |
| siRNA 1873 | 1873 | AACCUACAUGCCAGAUUUC | 5509 | GAAAUCUGGCAUGUAGGUU |
| siRNA 1874 | 1874 | ACCUACAUGCCAGAUUUCU | 5510 | AGAAAUCUGGCAUGUAGGU |
| siRNA 1875 | 1875 | CCUACAUGCCAGAUUUCUA | 5511 | UAGAAAUCUGGCAUGUAGG |
| siRNA 1876 | 1876 | CUACAUGCCAGAUUUCUAU | 5512 | AUAGAAAUCUGGCAUGUAG |
| siRNA 1877 | 1877 | UACAUGCCAGAUUUCUAUU | 5513 | AAUAGAAAUCUGGCAUGUA |
| siRNA 1878 | 1878 | ACAUGCCAGAUUUCUAUUC | 5514 | GAAUAGAAAUCUGGCAUGU |
| siRNA 1879 | 1879 | CAUGCCAGAUUUCUAUUCA | 5515 | UGAAUAGAAAUCUGGCAUG |
| siRNA 1880 | 1880 | AUGCCAGAUUUCUAUUCAA | 5516 | UUGAAUAGAAAUCUGGCAU |
| siRNA 1881 | 1881 | UGCCAGAUUUCUAUUCAAC | 5517 | GUUGAAUAGAAAUCUGGCA |
| siRNA 1882 | 1882 | GCCAGAUUUCUAUUCAACG | 5518 | CGUUGAAUAGAAAUCUGGC |
| siRNA 1883 | 1883 | CCAGAUUUCUAUUCAACGU | 5519 | ACGUUGAAUAGAAAUCUGG |
| siRNA 1884 | 1884 | CAGAUUUCUAUUCAACGUU | 5520 | AACGUUGAAUAGAAAUCUG |
| siRNA 1885 | 1885 | AGAUUUCUAUUCAACGUUA | 5521 | UAACGUUGAAUAGAAAUCU |
| siRNA 1886 | 1886 | GAUUUCUAUUCAACGUUAG | 5522 | CUAACGUUGAAUAGAAAUC |
| siRNA 1887 | 1887 | AUUUCUAUUCAACGUUAGA | 5523 | UCUAACGUUGAAUAGAAAU |
| siRNA 1888 | 1888 | UUUCUAUUCAACGUUAGAG | 5524 | CUCUAACGUUGAAUAGAAA |
| siRNA 1889 | 1889 | UUCUAUUCAACGUUAGAGU | 5525 | ACUCUAACGUUGAAUAGAA |
| siRNA 1890 | 1890 | UCUAUUCAACGUUAGAGUU | 5526 | AACUCUAACGUUGAAUAGA |
| siRNA 1891 | 1891 | CUAUUCAACGUUAGAGUUU | 5527 | AAACUCUAACGUUGAAUAG |
| siRNA 1892 | 1892 | UAUUCAACGUUAGAGUUUA | 5528 | UAAACUCUAACGUUGAAUA |
| siRNA 1893 | 1893 | AUUCAACGUUAGAGUUUAA | 5529 | UUAAACUCUAACGUUGAAU |
| siRNA 1894 | 1894 | UUCAACGUUAGAGUUUAAC | 5530 | GUUAAACUCUAACGUUGAA |
| siRNA 1895 | 1895 | UCAACGUUAGAGUUUAACA | 5531 | UGUUAAACUCUAACGUUGA |
| siRNA 1896 | 1896 | CAACGUUAGAGUUUAACAA | 5532 | UUGUUAAACUCUAACGUUG |
| siRNA 1897 | 1897 | AACGUUAGAGUUUAACAAA | 5533 | UUUGUUAAACUCUAACGUU |
| siRNA 1898 | 1898 | ACGUUAGAGUUUAACAAAA | 5534 | UUUUGUUAAACUCUAACGU |
| siRNA 1899 | 1899 | CGUUAGAGUUUAACAAAAU | 5535 | AUUUUGUUAAACUCUAACG |
| siRNA 1900 | 1900 | GUUAGAGUUUAACAAAAUA | 5536 | UAUUUUGUUAAACUCUAAC |
| siRNA 1901 | 1901 | UUAGAGUUUAACAAAAUAC | 5537 | GUAUUUUGUUAAACUCUAA |
| siRNA 1902 | 1902 | UAGAGUUUAACAAAAUACU | 5538 | AGUAUUUUGUUAAACUCUA |
| siRNA 1903 | 1903 | AGAGUUUAACAAAAUACUC | 5539 | GAGUAUUUUGUUAAACUCU |
| siRNA 1904 | 1904 | GAGUUUAACAAAAUACUCC | 5540 | GGAGUAUUUUGUUAAACUC |
| siRNA 1905 | 1905 | AGUUUAACAAAAUACUCCU | 5541 | AGGAGUAUUUUGUUAAACU |
| siRNA 1906 | 1906 | GUUUAACAAAAUACUCCUA | 5542 | UAGGAGUAUUUUGUUAAAC |
| siRNA 1907 | 1907 | UUUAACAAAAUACUCCUAG | 5543 | CUAGGAGUAUUUUGUUAAA |
| siRNA 1908 | 1908 | UUAACAAAAUACUCCUAGA | 5544 | UCUAGGAGUAUUUUGUUAA |
| siRNA 1909 | 1909 | UAACAAAAUACUCCUAGAA | 5545 | UUCUAGGAGUAUUUUGUUA |
| siRNA 1910 | 1910 | AACAAAAUACUCCUAGAAU | 5546 | AUUCUAGGAGUAUUUUGUU |
| siRNA 1911 | 1911 | ACAAAAUACUCCUAGAAUA | 5547 | UAUUCUAGGAGUAUUUUGU |
| siRNA 1912 | 1912 | CAAAAUACUCCUAGAAUAA | 5548 | UUAUUCUAGGAGUAUUUUG |
| siRNA 1913 | 1913 | AAAAUACUCCUAGAAUAAC | 5549 | GUUAUUCUAGGAGUAUUUU |
| siRNA 1914 | 1914 | AAAUACUCCUAGAAUAACU | 5550 | AGUUAUUCUAGGAGUAUUU |
| siRNA 1915 | 1915 | AAUACUCCUAGAAUAACUU | 5551 | AAGUUAUUCUAGGAGUAUU |
| siRNA 1916 | 1916 | AUACUCCUAGAAUAACUUG | 5552 | CAAGUUAUUCUAGGAGUAU |
| siRNA 1917 | 1917 | UACUCCUAGAAUAACUUGU | 5553 | ACAAGUUAUUCUAGGAGUA |
| siRNA 1918 | 1918 | ACUCCUAGAAUAACUUGUU | 5554 | AACAAGUUAUUCUAGGAGU |
| siRNA 1919 | 1919 | CUCCUAGAAUAACUUGUUA | 5555 | UAACAAGUUAUUCUAGGAG |
| siRNA 1920 | 1920 | UCCUAGAAUAACUUGUUAU | 5556 | AUAACAAGUUAUUCUAGGA |
| siRNA 1921 | 1921 | CCUAGAAUAACUUGUUAUA | 5557 | UAUAACAAGUUAUUCUAGG |
| siRNA 1922 | 1922 | CUAGAAUAACUUGUUAUAC | 5558 | GUAUAACAAGUUAUUCUAG |
| siRNA 1923 | 1923 | UAGAAUAACUUGUUAUACA | 5559 | UGUAUAACAAGUUAUUCUA |
| siRNA 1924 | 1924 | AGAAUAACUUGUUAUACAA | 5560 | UUGUAUAACAAGUUAUUCU |
| siRNA 1925 | 1925 | GAAUAACUUGUUAUACAAU | 5561 | AUUGUAUAACAAGUUAUUC |
| siRNA 1926 | 1926 | AAUAACUUGUUAUACAAUA | 5562 | UAUUGUAUAACAAGUUAUU |
| siRNA 1927 | 1927 | AUAACUUGUUAUACAAUAG | 5563 | CUAUUGUAUAACAAGUUAU |
| siRNA 1928 | 1928 | UAACUUGUUAUACAAUAGG | 5564 | CCUAUUGUAUAACAAGUUA |
| siRNA 1929 | 1929 | AACUUGUUAUACAAUAGGU | 5565 | ACCUAUUGUAUAACAAGUU |
| siRNA 1930 | 1930 | ACUUGUUAUACAAUAGGUU | 5566 | AACCUAUUGUAUAACAAGU |
| siRNA 1931 | 1931 | CUUGUUAUACAAUAGGUUC | 5567 | GAACCUAUUGUAUAACAAG |
| siRNA 1932 | 1932 | UUGUUAUACAAUAGGUUCU | 5568 | AGAACCUAUUGUAUAACAA |
| siRNA 1933 | 1933 | UGUUAUACAAUAGGUUCUA | 5569 | UAGAACCUAUUGUAUAACA |
| siRNA 1934 | 1934 | GUUAUACAAUAGGUUCUAA | 5570 | UUAGAACCUAUUGUAUAAC |
| siRNA 1935 | 1935 | UUAUACAAUAGGUUCUAAA | 5571 | UUUAGAACCUAUUGUAUAA |
| siRNA 1936 | 1936 | UAUACAAUAGGUUCUAAAA | 5572 | UUUUAGAACCUAUUGUAUA |
| siRNA 1937 | 1937 | AUACAAUAGGUUCUAAAAA | 5573 | UUUUUAGAACCUAUUGUAU |
| siRNA 1938 | 1938 | UACAAUAGGUUCUAAAAAU | 5574 | AUUUUUAGAACCUAUUGUA |
| siRNA 1939 | 1939 | ACAAUAGGUUCUAAAAAUA | 5575 | UAUUUUUAGAACCUAUUGU |
| siRNA 1940 | 1940 | CAAUAGGUUCUAAAAAUAA | 5576 | UUAUUUUUAGAACCUAUUG |
| siRNA 1941 | 1941 | AAUAGGUUCUAAAAAUAAA | 5577 | UUUAUUUUUAGAACCUAUU |
| siRNA 1942 | 1942 | AUAGGUUCUAAAAAUAAAA | 5578 | UUUUAUUUUUAGAACCUAU |
| siRNA 1943 | 1943 | UAGGUUCUAAAAAUAAAAU | 5579 | AUUUUAUUUUUAGAACCUA |
| siRNA 1944 | 1944 | AGGUUCUAAAAAUAAAAUU | 5580 | AAUUUUAUUUUUAGAACCU |
| siRNA 1945 | 1945 | GGUUCUAAAAAUAAAAUUG | 5581 | CAAUUUUAUUUUUAGAACC |
| siRNA 1946 | 1946 | GUUCUAAAAAUAAAAUUGC | 5582 | GCAAUUUUAUUUUUAGAAC |
| siRNA 1947 | 1947 | UUCUAAAAAUAAAAUUGCU | 5583 | AGCAAUUUUAUUUUUAGAA |
| siRNA 1948 | 1948 | UCUAAAAAUAAAAUUGCUA | 5584 | UAGCAAUUUUAUUUUUAGA |
| siRNA 1949 | 1949 | CUAAAAAUAAAAUUGCUAA | 5585 | UUAGCAAUUUUAUUUUUAG |
| siRNA 1950 | 1950 | UAAAAAUAAAAUUGCUAAA | 5586 | UUUAGCAAUUUUAUUUUUA |
| siRNA 1951 | 1951 | AAAAAUAAAAUUGCUAAAC | 5587 | GUUUAGCAAUUUUAUUUUU |
| siRNA 1952 | 1952 | AAAAUAAAAUUGCUAAACA | 5588 | UGUUUAGCAAUUUUAUUUU |
| siRNA 1953 | 1953 | AAAUAAAAUUGCUAAACAA | 5589 | UUGUUUAGCAAUUUUAUUU |
| siRNA 1954 | 1954 | AAUAAAAUUGCUAAACAAG | 5590 | CUUGUUUAGCAAUUUUAUU |
| siRNA 1955 | 1955 | AUAAAAUUGCUAAACAAGA | 5591 | UCUUGUUUAGCAAUUUUAU |
| siRNA 1956 | 1956 | UAAAAUUGCUAAACAAGAA | 5592 | UUCUUGUUUAGCAAUUUUA |
| siRNA 1957 | 1957 | AAAAUUGCUAAACAAGAAA | 5593 | UUUCUUGUUUAGCAAUUUU |
| siRNA 1958 | 1958 | AAAUUGCUAAACAAGAAAU | 5594 | AUUUCUUGUUUAGCAAUUU |
| siRNA 1959 | 1959 | AAUUGCUAAACAAGAAAUG | 5595 | CAUUUCUUGUUUAGCAAUU |
| siRNA 1960 | 1960 | AUUGCUAAACAAGAAAUGA | 5596 | UCAUUUCUUGUUUAGCAAU |
| siRNA 1961 | 1961 | UUGCUAAACAAGAAAUGAA | 5597 | UUCAUUUCUUGUUUAGCAA |
| siRNA 1962 | 1962 | UGCUAAACAAGAAAUGAAA | 5598 | UUUCAUUUCUUGUUUAGCA |
| siRNA 1963 | 1963 | GCUAAACAAGAAAUGAAAA | 5599 | UUUUCAUUUCUUGUUUAGC |
| siRNA 1964 | 1964 | CUAAACAAGAAAUGAAAAC | 5600 | GUUUUCAUUUCUUGUUUAG |
| siRNA 1965 | 1965 | UAAACAAGAAAUGAAAACA | 5601 | UGUUUUCAUUUCUUGUUUA |
| siRNA 1966 | 1966 | AAACAAGAAAUGAAAACAU | 5602 | AUGUUUUCAUUUCUUGUUU |
| siRNA 1967 | 1967 | AACAAGAAAUGAAAACAUG | 5603 | CAUGUUUUCAUUUCUUGUU |
| siRNA 1968 | 1968 | ACAAGAAAUGAAAACAUGG | 5604 | CCAUGUUUUCAUUUCUUGU |
| siRNA 1969 | 1969 | CAAGAAAUGAAAACAUGGA | 5605 | UCCAUGUUUUCAUUUCUUG |
| siRNA 1970 | 1970 | AAGAAAUGAAAACAUGGAG | 5606 | CUCCAUGUUUUCAUUUCUU |
| siRNA 1971 | 1971 | AGAAAUGAAAACAUGGAGC | 5607 | GCUCCAUGUUUUCAUUUCU |
| siRNA 1972 | 1972 | GAAAUGAAAACAUGGAGCA | 5608 | UGCUCCAUGUUUUCAUUUC |
| siRNA 1973 | 1973 | AAAUGAAAACAUGGAGCAU | 5609 | AUGCUCCAUGUUUUCAUUU |
| siRNA 1974 | 1974 | AAUGAAAACAUGGAGCAUU | 5610 | AAUGCUCCAUGUUUUCAUU |
| siRNA 1975 | 1975 | AUGAAAACAUGGAGCAUUG | 5611 | CAAUGCUCCAUGUUUUCAU |
| siRNA 1976 | 1976 | UGAAAACAUGGAGCAUUGU | 5612 | ACAAUGCUCCAUGUUUUCA |
| siRNA 1977 | 1977 | GAAAACAUGGAGCAUUGUU | 5613 | AACAAUGCUCCAUGUUUUC |
| siRNA 1978 | 1978 | AAAACAUGGAGCAUUGUUA | 5614 | UAACAAUGCUCCAUGUUUU |
| siRNA 1979 | 1979 | AAACAUGGAGCAUUGUUAA | 5615 | UUAACAAUGCUCCAUGUUU |
| siRNA 1980 | 1980 | AACAUGGAGCAUUGUUAAU | 5616 | AUUAACAAUGCUCCAUGUU |
| siRNA 1981 | 1981 | ACAUGGAGCAUUGUUAAUU | 5617 | AAUUAACAAUGCUCCAUGU |
| siRNA 1982 | 1982 | CAUGGAGCAUUGUUAAUUU | 5618 | AAAUUAACAAUGCUCCAUG |
| siRNA 1983 | 1983 | AUGGAGCAUUGUUAAUUUA | 5619 | UAAAUUAACAAUGCUCCAU |
| siRNA 1984 | 1984 | UGGAGCAUUGUUAAUUUAC | 5620 | GUAAAUUAACAAUGCUCCA |
| siRNA 1985 | 1985 | GGAGCAUUGUUAAUUUACA | 5621 | UGUAAAUUAACAAUGCUCC |
| siRNA 1986 | 1986 | GAGCAUUGUUAAUUUACAA | 5622 | UUGUAAAUUAACAAUGCUC |
| siRNA 1987 | 1987 | AGCAUUGUUAAUUUACAAC | 5623 | GUUGUAAAUUAACAAUGCU |
| siRNA 1988 | 1988 | GCAUUGUUAAUUUACAACA | 5624 | UGUUGUAAAUUAACAAUGC |
| siRNA 1989 | 1989 | CAUUGUUAAUUUACAACAG | 5625 | CUGUUGUAAAUUAACAAUG |
| siRNA 1990 | 1990 | AUUGUUAAUUUACAACAGA | 5626 | UCUGUUGUAAAUUAACAAU |
| siRNA 1991 | 1991 | UUGUUAAUUUACAACAGAA | 5627 | UUCUGUUGUAAAUUAACAA |
| siRNA 1992 | 1992 | UGUUAAUUUACAACAGAAA | 5628 | UUUCUGUUGUAAAUUAACA |
| siRNA 1993 | 1993 | GUUAAUUUACAACAGAAAA | 5629 | UUUUCUGUUGUAAAUUAAC |
| siRNA 1994 | 1994 | UUAAUUUACAACAGAAAAU | 5630 | AUUUUCUGUUGUAAAUUAA |
| siRNA 1995 | 1995 | UAAUUUACAACAGAAAAUU | 5631 | AAUUUUCUGUUGUAAAUUA |
| siRNA 1996 | 1996 | AAUUUACAACAGAAAAUUA | 5632 | UAAUUUUCUGUUGUAAAUU |
| siRNA 1997 | 1997 | AUUUACAACAGAAAAUUAC | 5633 | GUAAUUUUCUGUUGUAAAU |
| siRNA 1998 | 1998 | UUUACAACAGAAAAUUACC | 5634 | GGUAAUUUUCUGUUGUAAA |
| siRNA 1999 | 1999 | UUACAACAGAAAAUUACCU | 5635 | AGGUAAUUUUCUGUUGUAA |
| siRNA 2000 | 2000 | UACAACAGAAAAUUACCUU | 5636 | AAGGUAAUUUUCUGUUGUA |
| siRNA 2001 | 2001 | ACAACAGAAAAUUACCUUU | 5637 | AAAGGUAAUUUUCUGUUGU |
| siRNA 2002 | 2002 | CAACAGAAAAUUACCUUUU | 5638 | AAAAGGUAAUUUUCUGUUG |
| siRNA 2003 | 2003 | AACAGAAAAUUACCUUUUG | 5639 | CAAAAGGUAAUUUUCUGUU |
| siRNA 2004 | 2004 | ACAGAAAAUUACCUUUUGA | 5640 | UCAAAAGGUAAUUUUCUGU |
| siRNA 2005 | 2005 | CAGAAAAUUACCUUUUGAU | 5641 | AUCAAAAGGUAAUUUUCUG |
| siRNA 2006 | 2006 | AGAAAAUUACCUUUUGAUU | 5642 | AAUCAAAAGGUAAUUUUCU |
| siRNA 2007 | 2007 | GAAAAUUACCUUUUGAUUU | 5643 | AAAUCAAAAGGUAAUUUUC |
| siRNA 2008 | 2008 | AAAAUUACCUUUUGAUUUG | 5644 | CAAAUCAAAAGGUAAUUUU |
| siRNA 2009 | 2009 | AAAUUACCUUUUGAUUUGU | 5645 | ACAAAUCAAAAGGUAAUUU |
| siRNA 2010 | 2010 | AAUUACCUUUUGAUUUGUA | 5646 | UACAAAUCAAAAGGUAAUU |
| siRNA 2011 | 2011 | AUUACCUUUUGAUUUGUAA | 5647 | UUACAAAUCAAAAGGUAAU |
| siRNA 2012 | 2012 | UUACCUUUUGAUUUGUAAC | 5648 | GUUACAAAUCAAAAGGUAA |
| siRNA 2013 | 2013 | UACCUUUUGAUUUGUAACA | 5649 | UGUUACAAAUCAAAAGGUA |
| siRNA 2014 | 2014 | ACCUUUUGAUUUGUAACAC | 5650 | GUGUUACAAAUCAAAAGGU |
| siRNA 2015 | 2015 | CCUUUUGAUUUGUAACACU | 5651 | AGUGUUACAAAUCAAAAGG |
| siRNA 2016 | 2016 | CUUUUGAUUUGUAACACUA | 5652 | UAGUGUUACAAAUCAAAAG |
| siRNA 2017 | 2017 | UUUUGAUUUGUAACACUAC | 5653 | GUAGUGUUACAAAUCAAAA |
| siRNA 2018 | 2018 | UUUGAUUUGUAACACUACU | 5654 | AGUAGUGUUACAAAUCAAA |
| siRNA 2019 | 2019 | UUGAUUUGUAACACUACUU | 5655 | AAGUAGUGUUACAAAUCAA |
| siRNA 2020 | 2020 | UGAUUUGUAACACUACUUC | 5656 | GAAGUAGUGUUACAAAUCA |
| siRNA 2021 | 2021 | GAUUUGUAACACUACUUCU | 5657 | AGAAGUAGUGUUACAAAUC |
| siRNA 2022 | 2022 | AUUUGUAACACUACUUCUG | 5658 | CAGAAGUAGUGUUACAAAU |
| siRNA 2023 | 2023 | UUUGUAACACUACUUCUGC | 5659 | GCAGAAGUAGUGUUACAAA |
| siRNA 2024 | 2024 | UUGUAACACUACUUCUGCU | 5660 | AGCAGAAGUAGUGUUACAA |
| siRNA 2025 | 2025 | UGUAACACUACUUCUGCUG | 5661 | CAGCAGAAGUAGUGUUACA |
| siRNA 2026 | 2026 | GUAACACUACUUCUGCUGU | 5662 | ACAGCAGAAGUAGUGUUAC |
| siRNA 2027 | 2027 | UAACACUACUUCUGCUGUU | 5663 | AACAGCAGAAGUAGUGUUA |
| siRNA 2028 | 2028 | AACACUACUUCUGCUGUUC | 5664 | GAACAGCAGAAGUAGUGUU |
| siRNA 2029 | 2029 | ACACUACUUCUGCUGUUCA | 5665 | UGAACAGCAGAAGUAGUGU |
| siRNA 2030 | 2030 | CACUACUUCUGCUGUUCAA | 5666 | UUGAACAGCAGAAGUAGUG |
| siRNA 2031 | 2031 | ACUACUUCUGCUGUUCAAU | 5667 | AUUGAACAGCAGAAGUAGU |
| siRNA 2032 | 2032 | CUACUUCUGCUGUUCAAUC | 5668 | GAUUGAACAGCAGAAGUAG |
| siRNA 2033 | 2033 | UACUUCUGCUGUUCAAUCA | 5669 | UGAUUGAACAGCAGAAGUA |
| siRNA 2034 | 2034 | ACUUCUGCUGUUCAAUCAA | 5670 | UUGAUUGAACAGCAGAAGU |
| siRNA 2035 | 2035 | CUUCUGCUGUUCAAUCAAG | 5671 | CUUGAUUGAACAGCAGAAG |
| siRNA 2036 | 2036 | UUCUGCUGUUCAAUCAAGA | 5672 | UCUUGAUUGAACAGCAGAA |
| siRNA 2037 | 2037 | UCUGCUGUUCAAUCAAGAG | 5673 | CUCUUGAUUGAACAGCAGA |
| siRNA 2038 | 2038 | CUGCUGUUCAAUCAAGAGU | 5674 | ACUCUUGAUUGAACAGCAG |
| siRNA 2039 | 2039 | UGCUGUUCAAUCAAGAGUC | 5675 | GACUCUUGAUUGAACAGCA |
| siRNA 2040 | 2040 | GCUGUUCAAUCAAGAGUCU | 5676 | AGACUCUUGAUUGAACAGC |
| siRNA 2041 | 2041 | CUGUUCAAUCAAGAGUCUU | 5677 | AAGACUCUUGAUUGAACAG |
| siRNA 2042 | 2042 | UGUUCAAUCAAGAGUCUUG | 5678 | CAAGACUCUUGAUUGAACA |
| siRNA 2043 | 2043 | GUUCAAUCAAGAGUCUUGG | 5679 | CCAAGACUCUUGAUUGAAC |
| siRNA 2044 | 2044 | UUCAAUCAAGAGUCUUGGU | 5680 | ACCAAGACUCUUGAUUGAA |
| siRNA 2045 | 2045 | UCAAUCAAGAGUCUUGGUA | 5681 | UACCAAGACUCUUGAUUGA |
| siRNA 2046 | 2046 | CAAUCAAGAGUCUUGGUAG | 5682 | CUACCAAGACUCUUGAUUG |
| siRNA 2047 | 2047 | AAUCAAGAGUCUUGGUAGA | 5683 | UCUACCAAGACUCUUGAUU |
| siRNA 2048 | 2048 | AUCAAGAGUCUUGGUAGAU | 5684 | AUCUACCAAGACUCUUGAU |
| siRNA 2049 | 2049 | UCAAGAGUCUUGGUAGAUA | 5685 | UAUCUACCAAGACUCUUGA |
| siRNA 2050 | 2050 | CAAGAGUCUUGGUAGAUAA | 5686 | UUAUCUACCAAGACUCUUG |
| siRNA 2051 | 2051 | AAGAGUCUUGGUAGAUAAG | 5687 | CUUAUCUACCAAGACUCUU |
| siRNA 2052 | 2052 | AGAGUCUUGGUAGAUAAGA | 5688 | UCUUAUCUACCAAGACUCU |
| siRNA 2053 | 2053 | GAGUCUUGGUAGAUAAGAA | 5689 | UUCUUAUCUACCAAGACUC |
| siRNA 2054 | 2054 | AGUCUUGGUAGAUAAGAAA | 5690 | UUUCUUAUCUACCAAGACU |
| siRNA 2055 | 2055 | GUCUUGGUAGAUAAGAAAA | 5691 | UUUUCUUAUCUACCAAGAC |
| siRNA 2056 | 2056 | UCUUGGUAGAUAAGAAAAA | 5692 | UUUUUCUUAUCUACCAAGA |
| siRNA 2057 | 2057 | CUUGGUAGAUAAGAAAAAA | 5693 | UUUUUUCUUAUCUACCAAG |
| siRNA 2058 | 2058 | UUGGUAGAUAAGAAAAAAA | 5694 | UUUUUUUCUUAUCUACCAA |
| siRNA 2059 | 2059 | UGGUAGAUAAGAAAAAAAU | 5695 | AUUUUUUUCUUAUCUACCA |
| siRNA 2060 | 2060 | GGUAGAUAAGAAAAAAAUC | 5696 | GAUUUUUUUCUUAUCUACC |
| siRNA 2061 | 2061 | GUAGAUAAGAAAAAAAUCA | 5697 | UGAUUUUUUUCUUAUCUAC |
| siRNA 2062 | 2062 | UAGAUAAGAAAAAAAUCAG | 5698 | CUGAUUUUUUUCUUAUCUA |
| siRNA 2063 | 2063 | AGAUAAGAAAAAAAUCAGU | 5699 | ACUGAUUUUUUUCUUAUCU |
| siRNA 2064 | 2064 | GAUAAGAAAAAAAUCAGUC | 5700 | GACUGAUUUUUUUCUUAUC |
| siRNA 2065 | 2065 | AUAAGAAAAAAAUCAGUCA | 5701 | UGACUGAUUUUUUUCUUAU |
| siRNA 2066 | 2066 | UAAGAAAAAAAUCAGUCAA | 5702 | UUGACUGAUUUUUUUCUUA |
| siRNA 2067 | 2067 | AAGAAAAAAAUCAGUCAAU | 5703 | AUUGACUGAUUUUUUUCUU |
| siRNA 2068 | 2068 | AGAAAAAAAUCAGUCAAUA | 5704 | UAUUGACUGAUUUUUUUCU |
| siRNA 2069 | 2069 | GAAAAAAAUCAGUCAAUAU | 5705 | AUAUUGACUGAUUUUUUUC |
| siRNA 2070 | 2070 | AAAAAAAUCAGUCAAUAUU | 5706 | AAUAUUGACUGAUUUUUUU |
| siRNA 2071 | 2071 | AAAAAAUCAGUCAAUAUUU | 5707 | AAAUAUUGACUGAUUUUUU |
| siRNA 2072 | 2072 | AAAAAUCAGUCAAUAUUUC | 5708 | GAAAUAUUGACUGAUUUUU |
| siRNA 2073 | 2073 | AAAAUCAGUCAAUAUUUCC | 5709 | GGAAAUAUUGACUGAUUUU |
| siRNA 2074 | 2074 | AAAUCAGUCAAUAUUUCCA | 5710 | UGGAAAUAUUGACUGAUUU |
| siRNA 2075 | 2075 | AAUCAGUCAAUAUUUCCAA | 5711 | UUGGAAAUAUUGACUGAUU |
| siRNA 2076 | 2076 | AUCAGUCAAUAUUUCCAAA | 5712 | UUUGGAAAUAUUGACUGAU |
| siRNA 2077 | 2077 | UCAGUCAAUAUUUCCAAAU | 5713 | AUUUGGAAAUAUUGACUGA |
| siRNA 2078 | 2078 | CAGUCAAUAUUUCCAAAUA | 5714 | UAUUUGGAAAUAUUGACUG |
| siRNA 2079 | 2079 | AGUCAAUAUUUCCAAAUAA | 5715 | UUAUUUGGAAAUAUUGACU |
| siRNA 2080 | 2080 | GUCAAUAUUUCCAAAUAAU | 5716 | AUUAUUUGGAAAUAUUGAC |
| siRNA 2081 | 2081 | UCAAUAUUUCCAAAUAAUU | 5717 | AAUUAUUUGGAAAUAUUGA |
| siRNA 2082 | 2082 | CAAUAUUUCCAAAUAAUUG | 5718 | CAAUUAUUUGGAAAUAUUG |
| siRNA 2083 | 2083 | AAUAUUUCCAAAUAAUUGC | 5719 | GCAAUUAUUUGGAAAUAUU |
| siRNA 2084 | 2084 | AUAUUUCCAAAUAAUUGCA | 5720 | UGCAAUUAUUUGGAAAUAU |
| siRNA 2085 | 2085 | UAUUUCCAAAUAAUUGCAA | 5721 | UUGCAAUUAUUUGGAAAUA |
| siRNA 2086 | 2086 | AUUUCCAAAUAAUUGCAAA | 5722 | UUUGCAAUUAUUUGGAAAU |
| siRNA 2087 | 2087 | UUUCCAAAUAAUUGCAAAA | 5723 | UUUUGCAAUUAUUUGGAAA |
| siRNA 2088 | 2088 | UUCCAAAUAAUUGCAAAAU | 5724 | AUUUUGCAAUUAUUUGGAA |
| siRNA 2089 | 2089 | UCCAAAUAAUUGCAAAAUA | 5725 | UAUUUUGCAAUUAUUUGGA |
| siRNA 2090 | 2090 | CCAAAUAAUUGCAAAAUAA | 5726 | UUAUUUUGCAAUUAUUUGG |
| siRNA 2091 | 2091 | CAAAUAAUUGCAAAAUAAU | 5727 | AUUAUUUUGCAAUUAUUUG |
| siRNA 2092 | 2092 | AAAUAAUUGCAAAAUAAUG | 5728 | CAUUAUUUUGCAAUUAUUU |
| siRNA 2093 | 2093 | AAUAAUUGCAAAAUAAUGG | 5729 | CCAUUAUUUUGCAAUUAUU |
| siRNA 2094 | 2094 | AUAAUUGCAAAAUAAUGGC | 5730 | GCCAUUAUUUUGCAAUUAU |
| siRNA 2095 | 2095 | UAAUUGCAAAAUAAUGGCC | 5731 | GGCCAUUAUUUUGCAAUUA |
| siRNA 2096 | 2096 | AAUUGCAAAAUAAUGGCCA | 5732 | UGGCCAUUAUUUUGCAAUU |
| siRNA 2097 | 2097 | AUUGCAAAAUAAUGGCCAG | 5733 | CUGGCCAUUAUUUUGCAAU |
| siRNA 2098 | 2098 | UUGCAAAAUAAUGGCCAGU | 5734 | ACUGGCCAUUAUUUUGCAA |
| siRNA 2099 | 2099 | UGCAAAAUAAUGGCCAGUU | 5735 | AACUGGCCAUUAUUUUGCA |
| siRNA 2100 | 2100 | GCAAAAUAAUGGCCAGUUG | 5736 | CAACUGGCCAUUAUUUUGC |
| siRNA 2101 | 2101 | CAAAAUAAUGGCCAGUUGU | 5737 | ACAACUGGCCAUUAUUUUG |
| siRNA 2102 | 2102 | AAAAUAAUGGCCAGUUGUU | 5738 | AACAACUGGCCAUUAUUUU |
| siRNA 2103 | 2103 | AAAUAAUGGCCAGUUGUUU | 5739 | AAACAACUGGCCAUUAUUU |
| siRNA 2104 | 2104 | AAUAAUGGCCAGUUGUUUA | 5740 | UAAACAACUGGCCAUUAUU |
| siRNA 2105 | 2105 | AUAAUGGCCAGUUGUUUAG | 5741 | CUAAACAACUGGCCAUUAU |
| siRNA 2106 | 2106 | UAAUGGCCAGUUGUUUAGG | 5742 | CCUAAACAACUGGCCAUUA |
| siRNA 2107 | 2107 | AAUGGCCAGUUGUUUAGGA | 5743 | UCCUAAACAACUGGCCAUU |
| siRNA 2108 | 2108 | AUGGCCAGUUGUUUAGGAA | 5744 | UUCCUAAACAACUGGCCAU |
| siRNA 2109 | 2109 | UGGCCAGUUGUUUAGGAAG | 5745 | CUUCCUAAACAACUGGCCA |
| siRNA 2110 | 2110 | GGCCAGUUGUUUAGGAAGG | 5746 | CCUUCCUAAACAACUGGCC |
| siRNA 2111 | 2111 | GCCAGUUGUUUAGGAAGGC | 5747 | GCCUUCCUAAACAACUGGC |
| siRNA 2112 | 2112 | CCAGUUGUUUAGGAAGGCC | 5748 | GGCCUUCCUAAACAACUGG |
| siRNA 2113 | 2113 | CAGUUGUUUAGGAAGGCCU | 5749 | AGGCCUUCCUAAACAACUG |
| siRNA 2114 | 2114 | AGUUGUUUAGGAAGGCCUU | 5750 | AAGGCCUUCCUAAACAACU |
| siRNA 2115 | 2115 | GUUGUUUAGGAAGGCCUUU | 5751 | AAAGGCCUUCCUAAACAAC |
| siRNA 2116 | 2116 | UUGUUUAGGAAGGCCUUUA | 5752 | UAAAGGCCUUCCUAAACAA |
| siRNA 2117 | 2117 | UGUUUAGGAAGGCCUUUAG | 5753 | CUAAAGGCCUUCCUAAACA |
| siRNA 2118 | 2118 | GUUUAGGAAGGCCUUUAGG | 5754 | CCUAAAGGCCUUCCUAAAC |
| siRNA 2119 | 2119 | UUUAGGAAGGCCUUUAGGA | 5755 | UCCUAAAGGCCUUCCUAAA |
| siRNA 2120 | 2120 | UUAGGAAGGCCUUUAGGAA | 5756 | UUCCUAAAGGCCUUCCUAA |
| siRNA 2121 | 2121 | UAGGAAGGCCUUUAGGAAG | 5757 | CUUCCUAAAGGCCUUCCUA |
| siRNA 2122 | 2122 | AGGAAGGCCUUUAGGAAGA | 5758 | UCUUCCUAAAGGCCUUCCU |
| siRNA 2123 | 2123 | GGAAGGCCUUUAGGAAGAC | 5759 | GUCUUCCUAAAGGCCUUCC |
| siRNA 2124 | 2124 | GAAGGCCUUUAGGAAGACA | 5760 | UGUCUUCCUAAAGGCCUUC |
| siRNA 2125 | 2125 | AAGGCCUUUAGGAAGACAA | 5761 | UUGUCUUCCUAAAGGCCUU |
| siRNA 2126 | 2126 | AGGCCUUUAGGAAGACAAA | 5762 | UUUGUCUUCCUAAAGGCCU |
| siRNA 2127 | 2127 | GGCCUUUAGGAAGACAAAU | 5763 | AUUUGUCUUCCUAAAGGCC |
| siRNA 2128 | 2128 | GCCUUUAGGAAGACAAAUA | 5764 | UAUUUGUCUUCCUAAAGGC |
| siRNA 2129 | 2129 | CCUUUAGGAAGACAAAUAA | 5765 | UUAUUUGUCUUCCUAAAGG |
| siRNA 2130 | 2130 | CUUUAGGAAGACAAAUAAA | 5766 | UUUAUUUGUCUUCCUAAAG |
| siRNA 2131 | 2131 | UUUAGGAAGACAAAUAAAU | 5767 | AUUUAUUUGUCUUCCUAAA |
| siRNA 2132 | 2132 | UUAGGAAGACAAAUAAAUA | 5768 | UAUUUAUUUGUCUUCCUAA |
| siRNA 2133 | 2133 | UAGGAAGACAAAUAAAUAA | 5769 | UUAUUUAUUUGUCUUCCUA |
| siRNA 2134 | 2134 | AGGAAGACAAAUAAAUAAC | 5770 | GUUAUUUAUUUGUCUUCCU |
| siRNA 2135 | 2135 | GGAAGACAAAUAAAUAACA | 5771 | UGUUAUUUAUUUGUCUUCC |
| siRNA 2136 | 2136 | GAAGACAAAUAAAUAACAA | 5772 | UUGUUAUUUAUUUGUCUUC |
| siRNA 2137 | 2137 | AAGACAAAUAAAUAACAAA | 5773 | UUUGUUAUUUAUUUGUCUU |
| siRNA 2138 | 2138 | AGACAAAUAAAUAACAAAC | 5774 | GUUUGUUAUUUAUUUGUCU |
| siRNA 2139 | 2139 | GACAAAUAAAUAACAAACA | 5775 | UGUUUGUUAUUUAUUUGUC |
| siRNA 2140 | 2140 | ACAAAUAAAUAACAAACAA | 5776 | UUGUUUGUUAUUUAUUUGU |
| siRNA 2141 | 2141 | CAAAUAAAUAACAAACAAA | 5777 | UUUGUUUGUUAUUUAUUUG |
| siRNA 2142 | 2142 | AAAUAAAUAACAAACAAAC | 5778 | GUUUGUUUGUUAUUUAUUU |
| siRNA 2143 | 2143 | AAUAAAUAACAAACAAACA | 5779 | UGUUUGUUUGUUAUUUAUU |
| siRNA 2144 | 2144 | AUAAAUAACAAACAAACAG | 5780 | CUGUUUGUUUGUUAUUUAU |
| siRNA 2145 | 2145 | UAAAUAACAAACAAACAGC | 5781 | GCUGUUUGUUUGUUAUUUA |
| siRNA 2146 | 2146 | AAAUAACAAACAAACAGCC | 5782 | GGCUGUUUGUUUGUUAUUU |
| siRNA 2147 | 2147 | AAUAACAAACAAACAGCCA | 5783 | UGGCUGUUUGUUUGUUAUU |
| siRNA 2148 | 2148 | AUAACAAACAAACAGCCAC | 5784 | GUGGCUGUUUGUUUGUUAU |
| siRNA 2149 | 2149 | UAACAAACAAACAGCCACA | 5785 | UGUGGCUGUUUGUUUGUUA |
| siRNA 2150 | 2150 | AACAAACAAACAGCCACAA | 5786 | UUGUGGCUGUUUGUUUGUU |
| siRNA 2151 | 2151 | ACAAACAAACAGCCACAAA | 5787 | UUUGUGGCUGUUUGUUUGU |
| siRNA 2152 | 2152 | CAAACAAACAGCCACAAAU | 5788 | AUUUGUGGCUGUUUGUUUG |
| siRNA 2153 | 2153 | AAACAAACAGCCACAAAUA | 5789 | UAUUUGUGGCUGUUUGUUU |
| siRNA 2154 | 2154 | AACAAACAGCCACAAAUAC | 5790 | GUAUUUGUGGCUGUUUGUU |
| siRNA 2155 | 2155 | ACAAACAGCCACAAAUACU | 5791 | AGUAUUUGUGGCUGUUUGU |
| siRNA 2156 | 2156 | CAAACAGCCACAAAUACUU | 5792 | AAGUAUUUGUGGCUGUUUG |
| siRNA 2157 | 2157 | AAACAGCCACAAAUACUUU | 5793 | AAAGUAUUUGUGGCUGUUU |
| siRNA 2158 | 2158 | AACAGCCACAAAUACUUUU | 5794 | AAAAGUAUUUGUGGCUGUU |
| siRNA 2159 | 2159 | ACAGCCACAAAUACUUUUU | 5795 | AAAAAGUAUUUGUGGCUGU |
| siRNA 2160 | 2160 | CAGCCACAAAUACUUUUUU | 5796 | AAAAAAGUAUUUGUGGCUG |
| siRNA 2161 | 2161 | AGCCACAAAUACUUUUUUU | 5797 | AAAAAAAGUAUUUGUGGCU |
| siRNA 2162 | 2162 | GCCACAAAUACUUUUUUUU | 5798 | AAAAAAAAGUAUUUGUGGC |
| siRNA 2163 | 2163 | CCACAAAUACUUUUUUUUC | 5799 | GAAAAAAAAGUAUUUGUGG |
| siRNA 2164 | 2164 | CACAAAUACUUUUUUUUCA | 5800 | UGAAAAAAAAGUAUUUGUG |
| siRNA 2165 | 2165 | ACAAAUACUUUUUUUUCAA | 5801 | UUGAAAAAAAAGUAUUUGU |
| siRNA 2166 | 2166 | CAAAUACUUUUUUUUCAAA | 5802 | UUUGAAAAAAAAGUAUUUG |
| siRNA 2167 | 2167 | AAAUACUUUUUUUUCAAAA | 5803 | UUUUGAAAAAAAAGUAUUU |
| siRNA 2168 | 2168 | AAUACUUUUUUUUCAAAAU | 5804 | AUUUUGAAAAAAAAGUAUU |
| siRNA 2169 | 2169 | AUACUUUUUUUUCAAAAUU | 5805 | AAUUUUGAAAAAAAAGUAU |
| siRNA 2170 | 2170 | UACUUUUUUUUCAAAAUUU | 5806 | AAAUUUUGAAAAAAAAGUA |
| siRNA 2171 | 2171 | ACUUUUUUUUCAAAAUUUU | 5807 | AAAAUUUUGAAAAAAAAGU |
| siRNA 2172 | 2172 | CUUUUUUUUCAAAAUUUUA | 5808 | UAAAAUUUUGAAAAAAAAG |
| siRNA 2173 | 2173 | UUUUUUUUCAAAAUUUUAG | 5809 | CUAAAAUUUUGAAAAAAAA |
| siRNA 2174 | 2174 | UUUUUUUCAAAAUUUUAGU | 5810 | ACUAAAAUUUUGAAAAAAA |
| siRNA 2175 | 2175 | UUUUUUCAAAAUUUUAGUU | 5811 | AACUAAAAUUUUGAAAAAA |
| siRNA 2176 | 2176 | UUUUUCAAAAUUUUAGUUU | 5812 | AAACUAAAAUUUUGAAAAA |
| siRNA 2177 | 2177 | UUUUCAAAAUUUUAGUUUU | 5813 | AAAACUAAAAUUUUGAAAA |
| siRNA 2178 | 2178 | UUUCAAAAUUUUAGUUUUA | 5814 | UAAAACUAAAAUUUUGAAA |
| siRNA 2179 | 2179 | UUCAAAAUUUUAGUUUUAC | 5815 | GUAAAACUAAAAUUUUGAA |
| siRNA 2180 | 2180 | UCAAAAUUUUAGUUUUACC | 5816 | GGUAAAACUAAAAUUUUGA |
| siRNA 2181 | 2181 | CAAAAUUUUAGUUUUACCU | 5817 | AGGUAAAACUAAAAUUUUG |
| siRNA 2182 | 2182 | AAAAUUUUAGUUUUACCUG | 5818 | CAGGUAAAACUAAAAUUUU |
| siRNA 2183 | 2183 | AAAUUUUAGUUUUACCUGU | 5819 | ACAGGUAAAACUAAAAUUU |
| siRNA 2184 | 2184 | AAUUUUAGUUUUACCUGUA | 5820 | UACAGGUAAAACUAAAAUU |
| siRNA 2185 | 2185 | AUUUUAGUUUUACCUGUAA | 5821 | UUACAGGUAAAACUAAAAU |
| siRNA 2186 | 2186 | UUUUAGUUUUACCUGUAAU | 5822 | AUUACAGGUAAAACUAAAA |
| siRNA 2187 | 2187 | UUUAGUUUUACCUGUAAUU | 5823 | AAUUACAGGUAAAACUAAA |
| siRNA 2188 | 2188 | UUAGUUUUACCUGUAAUUA | 5824 | UAAUUACAGGUAAAACUAA |
| siRNA 2189 | 2189 | UAGUUUUACCUGUAAUUAA | 5825 | UUAAUUACAGGUAAAACUA |
| siRNA 2190 | 2190 | AGUUUUACCUGUAAUUAAU | 5826 | AUUAAUUACAGGUAAAACU |
| siRNA 2191 | 2191 | GUUUUACCUGUAAUUAAUA | 5827 | UAUUAAUUACAGGUAAAAC |
| siRNA 2192 | 2192 | UUUUACCUGUAAUUAAUAA | 5828 | UUAUUAAUUACAGGUAAAA |
| siRNA 2193 | 2193 | UUUACCUGUAAUUAAUAAG | 5829 | CUUAUUAAUUACAGGUAAA |
| siRNA 2194 | 2194 | UUACCUGUAAUUAAUAAGA | 5830 | UCUUAUUAAUUACAGGUAA |
| siRNA 2195 | 2195 | UACCUGUAAUUAAUAAGAA | 5831 | UUCUUAUUAAUUACAGGUA |
| siRNA 2196 | 2196 | ACCUGUAAUUAAUAAGAAC | 5832 | GUUCUUAUUAAUUACAGGU |
| siRNA 2197 | 2197 | CCUGUAAUUAAUAAGAACU | 5833 | AGUUCUUAUUAAUUACAGG |
| siRNA 2198 | 2198 | CUGUAAUUAAUAAGAACUG | 5834 | CAGUUCUUAUUAAUUACAG |
| siRNA 2199 | 2199 | UGUAAUUAAUAAGAACUGA | 5835 | UCAGUUCUUAUUAAUUACA |
| siRNA 2200 | 2200 | GUAAUUAAUAAGAACUGAU | 5836 | AUCAGUUCUUAUUAAUUAC |
| siRNA 2201 | 2201 | UAAUUAAUAAGAACUGAUA | 5837 | UAUCAGUUCUUAUUAAUUA |
| siRNA 2202 | 2202 | AAUUAAUAAGAACUGAUAC | 5838 | GUAUCAGUUCUUAUUAAUU |
| siRNA 2203 | 2203 | AUUAAUAAGAACUGAUACA | 5839 | UGUAUCAGUUCUUAUUAAU |
| siRNA 2204 | 2204 | UUAAUAAGAACUGAUACAA | 5840 | UUGUAUCAGUUCUUAUUAA |
| siRNA 2205 | 2205 | UAAUAAGAACUGAUACAAG | 5841 | CUUGUAUCAGUUCUUAUUA |
| siRNA 2206 | 2206 | AAUAAGAACUGAUACAAGA | 5842 | UCUUGUAUCAGUUCUUAUU |
| siRNA 2207 | 2207 | AUAAGAACUGAUACAAGAC | 5843 | GUCUUGUAUCAGUUCUUAU |
| siRNA 2208 | 2208 | UAAGAACUGAUACAAGACA | 5844 | UGUCUUGUAUCAGUUCUUA |
| siRNA 2209 | 2209 | AAGAACUGAUACAAGACAA | 5845 | UUGUCUUGUAUCAGUUCUU |
| siRNA 2210 | 2210 | AGAACUGAUACAAGACAAA | 5846 | UUUGUCUUGUAUCAGUUCU |
| siRNA 2211 | 2211 | GAACUGAUACAAGACAAAA | 5847 | UUUUGUCUUGUAUCAGUUC |
| siRNA 2212 | 2212 | AACUGAUACAAGACAAAAA | 5848 | UUUUUGUCUUGUAUCAGUU |
| siRNA 2213 | 2213 | ACUGAUACAAGACAAAAAC | 5849 | GUUUUUGUCUUGUAUCAGU |
| siRNA 2214 | 2214 | CUGAUACAAGACAAAAACA | 5850 | UGUUUUUGUCUUGUAUCAG |
| siRNA 2215 | 2215 | UGAUACAAGACAAAAACAG | 5851 | CUGUUUUUGUCUUGUAUCA |
| siRNA 2216 | 2216 | GAUACAAGACAAAAACAGU | 5852 | ACUGUUUUUGUCUUGUAUC |
| siRNA 2217 | 2217 | AUACAAGACAAAAACAGUU | 5853 | AACUGUUUUUGUCUUGUAU |
| siRNA 2218 | 2218 | UACAAGACAAAAACAGUUC | 5854 | GAACUGUUUUUGUCUUGUA |
| siRNA 2219 | 2219 | ACAAGACAAAAACAGUUCC | 5855 | GGAACUGUUUUUGUCUUGU |
| siRNA 2220 | 2220 | CAAGACAAAAACAGUUCCU | 5856 | AGGAACUGUUUUUGUCUUG |
| siRNA 2221 | 2221 | AAGACAAAAACAGUUCCUU | 5857 | AAGGAACUGUUUUUGUCUU |
| siRNA 2222 | 2222 | AGACAAAAACAGUUCCUUC | 5858 | GAAGGAACUGUUUUUGUCU |
| siRNA 2223 | 2223 | GACAAAAACAGUUCCUUCA | 5859 | UGAAGGAACUGUUUUUGUC |
| siRNA 2224 | 2224 | ACAAAAACAGUUCCUUCAG | 5860 | CUGAAGGAACUGUUUUUGU |
| siRNA 2225 | 2225 | CAAAAACAGUUCCUUCAGA | 5861 | UCUGAAGGAACUGUUUUUG |
| siRNA 2226 | 2226 | AAAAACAGUUCCUUCAGAU | 5862 | AUCUGAAGGAACUGUUUUU |
| siRNA 2227 | 2227 | AAAACAGUUCCUUCAGAUU | 5863 | AAUCUGAAGGAACUGUUUU |
| siRNA 2228 | 2228 | AAACAGUUCCUUCAGAUUC | 5864 | GAAUCUGAAGGAACUGUUU |
| siRNA 2229 | 2229 | AACAGUUCCUUCAGAUUCU | 5865 | AGAAUCUGAAGGAACUGUU |
| siRNA 2230 | 2230 | ACAGUUCCUUCAGAUUCUA | 5866 | UAGAAUCUGAAGGAACUGU |
| siRNA 2231 | 2231 | CAGUUCCUUCAGAUUCUAC | 5867 | GUAGAAUCUGAAGGAACUG |
| siRNA 2232 | 2232 | AGUUCCUUCAGAUUCUACG | 5868 | CGUAGAAUCUGAAGGAACU |
| siRNA 2233 | 2233 | GUUCCUUCAGAUUCUACGG | 5869 | CCGUAGAAUCUGAAGGAAC |
| siRNA 2234 | 2234 | UUCCUUCAGAUUCUACGGA | 5870 | UCCGUAGAAUCUGAAGGAA |
| siRNA 2235 | 2235 | UCCUUCAGAUUCUACGGAA | 5871 | UUCCGUAGAAUCUGAAGGA |
| siRNA 2236 | 2236 | CCUUCAGAUUCUACGGAAU | 5872 | AUUCCGUAGAAUCUGAAGG |
| siRNA 2237 | 2237 | CUUCAGAUUCUACGGAAUG | 5873 | CAUUCCGUAGAAUCUGAAG |
| siRNA 2238 | 2238 | UUCAGAUUCUACGGAAUGA | 5874 | UCAUUCCGUAGAAUCUGAA |
| siRNA 2239 | 2239 | UCAGAUUCUACGGAAUGAC | 5875 | GUCAUUCCGUAGAAUCUGA |
| siRNA 2240 | 2240 | CAGAUUCUACGGAAUGACA | 5876 | UGUCAUUCCGUAGAAUCUG |
| siRNA 2241 | 2241 | AGAUUCUACGGAAUGACAG | 5877 | CUGUCAUUCCGUAGAAUCU |
| siRNA 2242 | 2242 | GAUUCUACGGAAUGACAGU | 5878 | ACUGUCAUUCCGUAGAAUC |
| siRNA 2243 | 2243 | AUUCUACGGAAUGACAGUA | 5879 | UACUGUCAUUCCGUAGAAU |
| siRNA 2244 | 2244 | UUCUACGGAAUGACAGUAU | 5880 | AUACUGUCAUUCCGUAGAA |
| siRNA 2245 | 2245 | UCUACGGAAUGACAGUAUA | 5881 | UAUACUGUCAUUCCGUAGA |
| siRNA 2246 | 2246 | CUACGGAAUGACAGUAUAU | 5882 | AUAUACUGUCAUUCCGUAG |
| siRNA 2247 | 2247 | UACGGAAUGACAGUAUAUC | 5883 | GAUAUACUGUCAUUCCGUA |
| siRNA 2248 | 2248 | ACGGAAUGACAGUAUAUCU | 5884 | AGAUAUACUGUCAUUCCGU |
| siRNA 2249 | 2249 | CGGAAUGACAGUAUAUCUC | 5885 | GAGAUAUACUGUCAUUCCG |
| siRNA 2250 | 2250 | GGAAUGACAGUAUAUCUCU | 5886 | AGAGAUAUACUGUCAUUCC |
| siRNA 2251 | 2251 | GAAUGACAGUAUAUCUCUC | 5887 | GAGAGAUAUACUGUCAUUC |
| siRNA 2252 | 2252 | AAUGACAGUAUAUCUCUCU | 5888 | AGAGAGAUAUACUGUCAUU |
| siRNA 2253 | 2253 | AUGACAGUAUAUCUCUCUU | 5889 | AAGAGAGAUAUACUGUCAU |
| siRNA 2254 | 2254 | UGACAGUAUAUCUCUCUUU | 5890 | AAAGAGAGAUAUACUGUCA |
| siRNA 2255 | 2255 | GACAGUAUAUCUCUCUUUA | 5891 | UAAAGAGAGAUAUACUGUC |
| siRNA 2256 | 2256 | ACAGUAUAUCUCUCUUUAU | 5892 | AUAAAGAGAGAUAUACUGU |
| siRNA 2257 | 2257 | CAGUAUAUCUCUCUUUAUC | 5893 | GAUAAAGAGAGAUAUACUG |
| siRNA 2258 | 2258 | AGUAUAUCUCUCUUUAUCC | 5894 | GGAUAAAGAGAGAUAUACU |
| siRNA 2259 | 2259 | GUAUAUCUCUCUUUAUCCU | 5895 | AGGAUAAAGAGAGAUAUAC |
| siRNA 2260 | 2260 | UAUAUCUCUCUUUAUCCUA | 5896 | UAGGAUAAAGAGAGAUAUA |
| siRNA 2261 | 2261 | AUAUCUCUCUUUAUCCUAU | 5897 | AUAGGAUAAAGAGAGAUAU |
| siRNA 2262 | 2262 | UAUCUCUCUUUAUCCUAUG | 5898 | CAUAGGAUAAAGAGAGAUA |
| siRNA 2263 | 2263 | AUCUCUCUUUAUCCUAUGU | 5899 | ACAUAGGAUAAAGAGAGAU |
| siRNA 2264 | 2264 | UCUCUCUUUAUCCUAUGUG | 5900 | CACAUAGGAUAAAGAGAGA |
| siRNA 2265 | 2265 | CUCUCUUUAUCCUAUGUGA | 5901 | UCACAUAGGAUAAAGAGAG |
| siRNA 2266 | 2266 | UCUCUUUAUCCUAUGUGAU | 5902 | AUCACAUAGGAUAAAGAGA |
| siRNA 2267 | 2267 | CUCUUUAUCCUAUGUGAUU | 5903 | AAUCACAUAGGAUAAAGAG |
| siRNA 2268 | 2268 | UCUUUAUCCUAUGUGAUUC | 5904 | GAAUCACAUAGGAUAAAGA |
| siRNA 2269 | 2269 | CUUUAUCCUAUGUGAUUCC | 5905 | GGAAUCACAUAGGAUAAAG |
| siRNA 2270 | 2270 | UUUAUCCUAUGUGAUUCCU | 5906 | AGGAAUCACAUAGGAUAAA |
| siRNA 2271 | 2271 | UUAUCCUAUGUGAUUCCUG | 5907 | CAGGAAUCACAUAGGAUAA |
| siRNA 2272 | 2272 | UAUCCUAUGUGAUUCCUGC | 5908 | GCAGGAAUCACAUAGGAUA |
| siRNA 2273 | 2273 | AUCCUAUGUGAUUCCUGCU | 5909 | AGCAGGAAUCACAUAGGAU |
| siRNA 2274 | 2274 | UCCUAUGUGAUUCCUGCUC | 5910 | GAGCAGGAAUCACAUAGGA |
| siRNA 2275 | 2275 | CCUAUGUGAUUCCUGCUCU | 5911 | AGAGCAGGAAUCACAUAGG |
| siRNA 2276 | 2276 | CUAUGUGAUUCCUGCUCUG | 5912 | CAGAGCAGGAAUCACAUAG |
| siRNA 2277 | 2277 | UAUGUGAUUCCUGCUCUGA | 5913 | UCAGAGCAGGAAUCACAUA |
| siRNA 2278 | 2278 | AUGUGAUUCCUGCUCUGAA | 5914 | UUCAGAGCAGGAAUCACAU |
| siRNA 2279 | 2279 | UGUGAUUCCUGCUCUGAAU | 5915 | AUUCAGAGCAGGAAUCACA |
| siRNA 2280 | 2280 | GUGAUUCCUGCUCUGAAUG | 5916 | CAUUCAGAGCAGGAAUCAC |
| siRNA 2281 | 2281 | UGAUUCCUGCUCUGAAUGC | 5917 | GCAUUCAGAGCAGGAAUCA |
| siRNA 2282 | 2282 | GAUUCCUGCUCUGAAUGCA | 5918 | UGCAUUCAGAGCAGGAAUC |
| siRNA 2283 | 2283 | AUUCCUGCUCUGAAUGCAU | 5919 | AUGCAUUCAGAGCAGGAAU |
| siRNA 2284 | 2284 | UUCCUGCUCUGAAUGCAUU | 5920 | AAUGCAUUCAGAGCAGGAA |
| siRNA 2285 | 2285 | UCCUGCUCUGAAUGCAUUA | 5921 | UAAUGCAUUCAGAGCAGGA |
| siRNA 2286 | 2286 | CCUGCUCUGAAUGCAUUAU | 5922 | AUAAUGCAUUCAGAGCAGG |
| siRNA 2287 | 2287 | CUGCUCUGAAUGCAUUAUA | 5923 | UAUAAUGCAUUCAGAGCAG |
| siRNA 2288 | 2288 | UGCUCUGAAUGCAUUAUAU | 5924 | AUAUAAUGCAUUCAGAGCA |
| siRNA 2289 | 2289 | GCUCUGAAUGCAUUAUAUU | 5925 | AAUAUAAUGCAUUCAGAGC |
| siRNA 2290 | 2290 | CUCUGAAUGCAUUAUAUUU | 5926 | AAAUAUAAUGCAUUCAGAG |
| siRNA 2291 | 2291 | UCUGAAUGCAUUAUAUUUU | 5927 | AAAAUAUAAUGCAUUCAGA |
| siRNA 2292 | 2292 | CUGAAUGCAUUAUAUUUUC | 5928 | GAAAAUAUAAUGCAUUCAG |
| siRNA 2293 | 2293 | UGAAUGCAUUAUAUUUUCC | 5929 | GGAAAAUAUAAUGCAUUCA |
| siRNA 2294 | 2294 | GAAUGCAUUAUAUUUUCCA | 5930 | UGGAAAAUAUAAUGCAUUC |
| siRNA 2295 | 2295 | AAUGCAUUAUAUUUUCCAA | 5931 | UUGGAAAAUAUAAUGCAUU |
| siRNA 2296 | 2296 | AUGCAUUAUAUUUUCCAAA | 5932 | UUUGGAAAAUAUAAUGCAU |
| siRNA 2297 | 2297 | UGCAUUAUAUUUUCCAAAC | 5933 | GUUUGGAAAAUAUAAUGCA |
| siRNA 2298 | 2298 | GCAUUAUAUUUUCCAAACU | 5934 | AGUUUGGAAAAUAUAAUGC |
| siRNA 2299 | 2299 | CAUUAUAUUUUCCAAACUA | 5935 | UAGUUUGGAAAAUAUAAUG |
| siRNA 2300 | 2300 | AUUAUAUUUUCCAAACUAU | 5936 | AUAGUUUGGAAAAUAUAAU |
| siRNA 2301 | 2301 | UUAUAUUUUCCAAACUAUA | 5937 | UAUAGUUUGGAAAAUAUAA |
| siRNA 2302 | 2302 | UAUAUUUUCCAAACUAUAC | 5938 | GUAUAGUUUGGAAAAUAUA |
| siRNA 2303 | 2303 | AUAUUUUCCAAACUAUACC | 5939 | GGUAUAGUUUGGAAAAUAU |
| siRNA 2304 | 2304 | UAUUUUCCAAACUAUACCC | 5940 | GGGUAUAGUUUGGAAAAUA |
| siRNA 2305 | 2305 | AUUUUCCAAACUAUACCCA | 5941 | UGGGUAUAGUUUGGAAAAU |
| siRNA 2306 | 2306 | UUUUCCAAACUAUACCCAU | 5942 | AUGGGUAUAGUUUGGAAAA |
| siRNA 2307 | 2307 | UUUCCAAACUAUACCCAUA | 5943 | UAUGGGUAUAGUUUGGAAA |
| siRNA 2308 | 2308 | UUCCAAACUAUACCCAUAA | 5944 | UUAUGGGUAUAGUUUGGAA |
| siRNA 2309 | 2309 | UCCAAACUAUACCCAUAAA | 5945 | UUUAUGGGUAUAGUUUGGA |
| siRNA 2310 | 2310 | CCAAACUAUACCCAUAAAU | 5946 | AUUUAUGGGUAUAGUUUGG |
| siRNA 2311 | 2311 | CAAACUAUACCCAUAAAUU | 5947 | AAUUUAUGGGUAUAGUUUG |
| siRNA 2312 | 2312 | AAACUAUACCCAUAAAUUG | 5948 | CAAUUUAUGGGUAUAGUUU |
| siRNA 2313 | 2313 | AACUAUACCCAUAAAUUGU | 5949 | ACAAUUUAUGGGUAUAGUU |
| siRNA 2314 | 2314 | ACUAUACCCAUAAAUUGUG | 5950 | CACAAUUUAUGGGUAUAGU |
| siRNA 2315 | 2315 | CUAUACCCAUAAAUUGUGA | 5951 | UCACAAUUUAUGGGUAUAG |
| siRNA 2316 | 2316 | UAUACCCAUAAAUUGUGAC | 5952 | GUCACAAUUUAUGGGUAUA |
| siRNA 2317 | 2317 | AUACCCAUAAAUUGUGACU | 5953 | AGUCACAAUUUAUGGGUAU |
| siRNA 2318 | 2318 | UACCCAUAAAUUGUGACUA | 5954 | UAGUCACAAUUUAUGGGUA |
| siRNA 2319 | 2319 | ACCCAUAAAUUGUGACUAG | 5955 | CUAGUCACAAUUUAUGGGU |
| siRNA 2320 | 2320 | CCCAUAAAUUGUGACUAGU | 5956 | ACUAGUCACAAUUUAUGGG |
| siRNA 2321 | 2321 | CCAUAAAUUGUGACUAGUA | 5957 | UACUAGUCACAAUUUAUGG |
| siRNA 2322 | 2322 | CAUAAAUUGUGACUAGUAA | 5958 | UUACUAGUCACAAUUUAUG |
| siRNA 2323 | 2323 | AUAAAUUGUGACUAGUAAA | 5959 | UUUACUAGUCACAAUUUAU |
| siRNA 2324 | 2324 | UAAAUUGUGACUAGUAAAA | 5960 | UUUUACUAGUCACAAUUUA |
| siRNA 2325 | 2325 | AAAUUGUGACUAGUAAAAU | 5961 | AUUUUACUAGUCACAAUUU |
| siRNA 2326 | 2326 | AAUUGUGACUAGUAAAAUA | 5962 | UAUUUUACUAGUCACAAUU |
| siRNA 2327 | 2327 | AUUGUGACUAGUAAAAUAC | 5963 | GUAUUUUACUAGUCACAAU |
| siRNA 2328 | 2328 | UUGUGACUAGUAAAAUACU | 5964 | AGUAUUUUACUAGUCACAA |
| siRNA 2329 | 2329 | UGUGACUAGUAAAAUACUU | 5965 | AAGUAUUUUACUAGUCACA |
| siRNA 2330 | 2330 | GUGACUAGUAAAAUACUUA | 5966 | UAAGUAUUUUACUAGUCAC |
| siRNA 2331 | 2331 | UGACUAGUAAAAUACUUAC | 5967 | GUAAGUAUUUUACUAGUCA |
| siRNA 2332 | 2332 | GACUAGUAAAAUACUUACA | 5968 | UGUAAGUAUUUUACUAGUC |
| siRNA 2333 | 2333 | ACUAGUAAAAUACUUACAC | 5969 | GUGUAAGUAUUUUACUAGU |
| siRNA 2334 | 2334 | CUAGUAAAAUACUUACACA | 5970 | UGUGUAAGUAUUUUACUAG |
| siRNA 2335 | 2335 | UAGUAAAAUACUUACACAG | 5971 | CUGUGUAAGUAUUUUACUA |
| siRNA 2336 | 2336 | AGUAAAAUACUUACACAGA | 5972 | UCUGUGUAAGUAUUUUACU |
| siRNA 2337 | 2337 | GUAAAAUACUUACACAGAG | 5973 | CUCUGUGUAAGUAUUUUAC |
| siRNA 2338 | 2338 | UAAAAUACUUACACAGAGC | 5974 | GCUCUGUGUAAGUAUUUUA |
| siRNA 2339 | 2339 | AAAAUACUUACACAGAGCA | 5975 | UGCUCUGUGUAAGUAUUUU |
| siRNA 2340 | 2340 | AAAUACUUACACAGAGCAG | 5976 | CUGCUCUGUGUAAGUAUUU |
| siRNA 2341 | 2341 | AAUACUUACACAGAGCAGA | 5977 | UCUGCUCUGUGUAAGUAUU |
| siRNA 2342 | 2342 | AUACUUACACAGAGCAGAA | 5978 | UUCUGCUCUGUGUAAGUAU |
| siRNA 2343 | 2343 | UACUUACACAGAGCAGAAU | 5979 | AUUCUGCUCUGUGUAAGUA |
| siRNA 2344 | 2344 | ACUUACACAGAGCAGAAUU | 5980 | AAUUCUGCUCUGUGUAAGU |
| siRNA 2345 | 2345 | CUUACACAGAGCAGAAUUU | 5981 | AAAUUCUGCUCUGUGUAAG |
| siRNA 2346 | 2346 | UUACACAGAGCAGAAUUUU | 5982 | AAAAUUCUGCUCUGUGUAA |
| siRNA 2347 | 2347 | UACACAGAGCAGAAUUUUC | 5983 | GAAAAUUCUGCUCUGUGUA |
| siRNA 2348 | 2348 | ACACAGAGCAGAAUUUUCA | 5984 | UGAAAAUUCUGCUCUGUGU |
| siRNA 2349 | 2349 | CACAGAGCAGAAUUUUCAC | 5985 | GUGAAAAUUCUGCUCUGUG |
| siRNA 2350 | 2350 | ACAGAGCAGAAUUUUCACA | 5986 | UGUGAAAAUUCUGCUCUGU |
| siRNA 2351 | 2351 | CAGAGCAGAAUUUUCACAG | 5987 | CUGUGAAAAUUCUGCUCUG |
| siRNA 2352 | 2352 | AGAGCAGAAUUUUCACAGA | 5988 | UCUGUGAAAAUUCUGCUCU |
| siRNA 2353 | 2353 | GAGCAGAAUUUUCACAGAU | 5989 | AUCUGUGAAAAUUCUGCUC |
| siRNA 2354 | 2354 | AGCAGAAUUUUCACAGAUG | 5990 | CAUCUGUGAAAAUUCUGCU |
| siRNA 2355 | 2355 | GCAGAAUUUUCACAGAUGG | 5991 | CCAUCUGUGAAAAUUCUGC |
| siRNA 2356 | 2356 | CAGAAUUUUCACAGAUGGC | 5992 | GCCAUCUGUGAAAAUUCUG |
| siRNA 2357 | 2357 | AGAAUUUUCACAGAUGGCA | 5993 | UGCCAUCUGUGAAAAUUCU |
| siRNA 2358 | 2358 | GAAUUUUCACAGAUGGCAA | 5994 | UUGCCAUCUGUGAAAAUUC |
| siRNA 2359 | 2359 | AAUUUUCACAGAUGGCAAA | 5995 | UUUGCCAUCUGUGAAAAUU |
| siRNA 2360 | 2360 | AUUUUCACAGAUGGCAAAA | 5996 | UUUUGCCAUCUGUGAAAAU |
| siRNA 2361 | 2361 | UUUUCACAGAUGGCAAAAA | 5997 | UUUUUGCCAUCUGUGAAAA |
| siRNA 2362 | 2362 | UUUCACAGAUGGCAAAAAA | 5998 | UUUUUUGCCAUCUGUGAAA |
| siRNA 2363 | 2363 | UUCACAGAUGGCAAAAAAA | 5999 | UUUUUUUGCCAUCUGUGAA |
| siRNA 2364 | 2364 | UCACAGAUGGCAAAAAAAU | 6000 | AUUUUUUUGCCAUCUGUGA |
| siRNA 2365 | 2365 | CACAGAUGGCAAAAAAAUU | 6001 | AAUUUUUUUGCCAUCUGUG |
| siRNA 2366 | 2366 | ACAGAUGGCAAAAAAAUUU | 6002 | AAAUUUUUUUGCCAUCUGU |
| siRNA 2367 | 2367 | CAGAUGGCAAAAAAAUUUA | 6003 | UAAAUUUUUUUGCCAUCUG |
| siRNA 2368 | 2368 | AGAUGGCAAAAAAAUUUAA | 6004 | UUAAAUUUUUUUGCCAUCU |
| siRNA 2369 | 2369 | GAUGGCAAAAAAAUUUAAA | 6005 | UUUAAAUUUUUUUGCCAUC |
| siRNA 2370 | 2370 | AUGGCAAAAAAAUUUAAAG | 6006 | CUUUAAAUUUUUUUGCCAU |
| siRNA 2371 | 2371 | UGGCAAAAAAAUUUAAAGA | 6007 | UCUUUAAAUUUUUUUGCCA |
| siRNA 2372 | 2372 | GGCAAAAAAAUUUAAAGAU | 6008 | AUCUUUAAAUUUUUUUGCC |
| siRNA 2373 | 2373 | GCAAAAAAAUUUAAAGAUG | 6009 | CAUCUUUAAAUUUUUUUGC |
| siRNA 2374 | 2374 | CAAAAAAAUUUAAAGAUGU | 6010 | ACAUCUUUAAAUUUUUUUG |
| siRNA 2375 | 2375 | AAAAAAAUUUAAAGAUGUC | 6011 | GACAUCUUUAAAUUUUUUU |
| siRNA 2376 | 2376 | AAAAAAUUUAAAGAUGUCC | 6012 | GGACAUCUUUAAAUUUUUU |
| siRNA 2377 | 2377 | AAAAAUUUAAAGAUGUCCA | 6013 | UGGACAUCUUUAAAUUUUU |
| siRNA 2378 | 2378 | AAAAUUUAAAGAUGUCCAA | 6014 | UUGGACAUCUUUAAAUUUU |
| siRNA 2379 | 2379 | AAAUUUAAAGAUGUCCAAU | 6015 | AUUGGACAUCUUUAAAUUU |
| siRNA 2380 | 2380 | AAUUUAAAGAUGUCCAAUA | 6016 | UAUUGGACAUCUUUAAAUU |
| siRNA 2381 | 2381 | AUUUAAAGAUGUCCAAUAU | 6017 | AUAUUGGACAUCUUUAAAU |
| siRNA 2382 | 2382 | UUUAAAGAUGUCCAAUAUA | 6018 | UAUAUUGGACAUCUUUAAA |
| siRNA 2383 | 2383 | UUAAAGAUGUCCAAUAUAU | 6019 | AUAUAUUGGACAUCUUUAA |
| siRNA 2384 | 2384 | UAAAGAUGUCCAAUAUAUG | 6020 | CAUAUAUUGGACAUCUUUA |
| siRNA 2385 | 2385 | AAAGAUGUCCAAUAUAUGU | 6021 | ACAUAUAUUGGACAUCUUU |
| siRNA 2386 | 2386 | AAGAUGUCCAAUAUAUGUG | 6022 | CACAUAUAUUGGACAUCUU |
| siRNA 2387 | 2387 | AGAUGUCCAAUAUAUGUGG | 6023 | CCACAUAUAUUGGACAUCU |
| siRNA 2388 | 2388 | GAUGUCCAAUAUAUGUGGG | 6024 | CCCACAUAUAUUGGACAUC |
| siRNA 2389 | 2389 | AUGUCCAAUAUAUGUGGGA | 6025 | UCCCACAUAUAUUGGACAU |
| siRNA 2390 | 2390 | UGUCCAAUAUAUGUGGGAA | 6026 | UUCCCACAUAUAUUGGACA |
| siRNA 2391 | 2391 | GUCCAAUAUAUGUGGGAAA | 6027 | UUUCCCACAUAUAUUGGAC |
| siRNA 2392 | 2392 | UCCAAUAUAUGUGGGAAAA | 6028 | UUUUCCCACAUAUAUUGGA |
| siRNA 2393 | 2393 | CCAAUAUAUGUGGGAAAAG | 6029 | CUUUUCCCACAUAUAUUGG |
| siRNA 2394 | 2394 | CAAUAUAUGUGGGAAAAGA | 6030 | UCUUUUCCCACAUAUAUUG |
| siRNA 2395 | 2395 | AAUAUAUGUGGGAAAAGAG | 6031 | CUCUUUUCCCACAUAUAUU |
| siRNA 2396 | 2396 | AUAUAUGUGGGAAAAGAGC | 6032 | GCUCUUUUCCCACAUAUAU |
| siRNA 2397 | 2397 | UAUAUGUGGGAAAAGAGCU | 6033 | AGCUCUUUUCCCACAUAUA |
| siRNA 2398 | 2398 | AUAUGUGGGAAAAGAGCUA | 6034 | UAGCUCUUUUCCCACAUAU |
| siRNA 2399 | 2399 | UAUGUGGGAAAAGAGCUAA | 6035 | UUAGCUCUUUUCCCACAUA |
| siRNA 2400 | 2400 | AUGUGGGAAAAGAGCUAAC | 6036 | GUUAGCUCUUUUCCCACAU |
| siRNA 2401 | 2401 | UGUGGGAAAAGAGCUAACA | 6037 | UGUUAGCUCUUUUCCCACA |
| siRNA 2402 | 2402 | GUGGGAAAAGAGCUAACAG | 6038 | CUGUUAGCUCUUUUCCCAC |
| siRNA 2403 | 2403 | UGGGAAAAGAGCUAACAGA | 6039 | UCUGUUAGCUCUUUUCCCA |
| siRNA 2404 | 2404 | GGGAAAAGAGCUAACAGAG | 6040 | CUCUGUUAGCUCUUUUCCC |
| siRNA 2405 | 2405 | GGAAAAGAGCUAACAGAGA | 6041 | UCUCUGUUAGCUCUUUUCC |
| siRNA 2406 | 2406 | GAAAAGAGCUAACAGAGAG | 6042 | CUCUCUGUUAGCUCUUUUC |
| siRNA 2407 | 2407 | AAAAGAGCUAACAGAGAGA | 6043 | UCUCUCUGUUAGCUCUUUU |
| siRNA 2408 | 2408 | AAAGAGCUAACAGAGAGAU | 6044 | AUCUCUCUGUUAGCUCUUU |
| siRNA 2409 | 2409 | AAGAGCUAACAGAGAGAUC | 6045 | GAUCUCUCUGUUAGCUCUU |
| siRNA 2410 | 2410 | AGAGCUAACAGAGAGAUCA | 6046 | UGAUCUCUCUGUUAGCUCU |
| siRNA 2411 | 2411 | GAGCUAACAGAGAGAUCAU | 6047 | AUGAUCUCUCUGUUAGCUC |
| siRNA 2412 | 2412 | AGCUAACAGAGAGAUCAUU | 6048 | AAUGAUCUCUCUGUUAGCU |
| siRNA 2413 | 2413 | GCUAACAGAGAGAUCAUUA | 6049 | UAAUGAUCUCUCUGUUAGC |
| siRNA 2414 | 2414 | CUAACAGAGAGAUCAUUAU | 6050 | AUAAUGAUCUCUCUGUUAG |
| siRNA 2415 | 2415 | UAACAGAGAGAUCAUUAUU | 6051 | AAUAAUGAUCUCUCUGUUA |
| siRNA 2416 | 2416 | AACAGAGAGAUCAUUAUUU | 6052 | AAAUAAUGAUCUCUCUGUU |
| siRNA 2417 | 2417 | ACAGAGAGAUCAUUAUUUC | 6053 | GAAAUAAUGAUCUCUCUGU |
| siRNA 2418 | 2418 | CAGAGAGAUCAUUAUUUCU | 6054 | AGAAAUAAUGAUCUCUCUG |
| siRNA 2419 | 2419 | AGAGAGAUCAUUAUUUCUU | 6055 | AAGAAAUAAUGAUCUCUCU |
| siRNA 2420 | 2420 | GAGAGAUCAUUAUUUCUUA | 6056 | UAAGAAAUAAUGAUCUCUC |
| siRNA 2421 | 2421 | AGAGAUCAUUAUUUCUUAA | 6057 | UUAAGAAAUAAUGAUCUCU |
| siRNA 2422 | 2422 | GAGAUCAUUAUUUCUUAAA | 6058 | UUUAAGAAAUAAUGAUCUC |
| siRNA 2423 | 2423 | AGAUCAUUAUUUCUUAAAG | 6059 | CUUUAAGAAAUAAUGAUCU |
| siRNA 2424 | 2424 | GAUCAUUAUUUCUUAAAGA | 6060 | UCUUUAAGAAAUAAUGAUC |
| siRNA 2425 | 2425 | AUCAUUAUUUCUUAAAGAU | 6061 | AUCUUUAAGAAAUAAUGAU |
| siRNA 2426 | 2426 | UCAUUAUUUCUUAAAGAUU | 6062 | AAUCUUUAAGAAAUAAUGA |
| siRNA 2427 | 2427 | CAUUAUUUCUUAAAGAUUG | 6063 | CAAUCUUUAAGAAAUAAUG |
| siRNA 2428 | 2428 | AUUAUUUCUUAAAGAUUGG | 6064 | CCAAUCUUUAAGAAAUAAU |
| siRNA 2429 | 2429 | UUAUUUCUUAAAGAUUGGC | 6065 | GCCAAUCUUUAAGAAAUAA |
| siRNA 2430 | 2430 | UAUUUCUUAAAGAUUGGCC | 6066 | GGCCAAUCUUUAAGAAAUA |
| siRNA 2431 | 2431 | AUUUCUUAAAGAUUGGCCA | 6067 | UGGCCAAUCUUUAAGAAAU |
| siRNA 2432 | 2432 | UUUCUUAAAGAUUGGCCAU | 6068 | AUGGCCAAUCUUUAAGAAA |
| siRNA 2433 | 2433 | UUCUUAAAGAUUGGCCAUA | 6069 | UAUGGCCAAUCUUUAAGAA |
| siRNA 2434 | 2434 | UCUUAAAGAUUGGCCAUAA | 6070 | UUAUGGCCAAUCUUUAAGA |
| siRNA 2435 | 2435 | CUUAAAGAUUGGCCAUAAC | 6071 | GUUAUGGCCAAUCUUUAAG |
| siRNA 2436 | 2436 | UUAAAGAUUGGCCAUAACC | 6072 | GGUUAUGGCCAAUCUUUAA |
| siRNA 2437 | 2437 | UAAAGAUUGGCCAUAACCU | 6073 | AGGUUAUGGCCAAUCUUUA |
| siRNA 2438 | 2438 | AAAGAUUGGCCAUAACCUG | 6074 | CAGGUUAUGGCCAAUCUUU |
| siRNA 2439 | 2439 | AAGAUUGGCCAUAACCUGU | 6075 | ACAGGUUAUGGCCAAUCUU |
| siRNA 2440 | 2440 | AGAUUGGCCAUAACCUGUA | 6076 | UACAGGUUAUGGCCAAUCU |
| siRNA 2441 | 2441 | GAUUGGCCAUAACCUGUAU | 6077 | AUACAGGUUAUGGCCAAUC |
| siRNA 2442 | 2442 | AUUGGCCAUAACCUGUAUU | 6078 | AAUACAGGUUAUGGCCAAU |
| siRNA 2443 | 2443 | UUGGCCAUAACCUGUAUUU | 6079 | AAAUACAGGUUAUGGCCAA |
| siRNA 2444 | 2444 | UGGCCAUAACCUGUAUUUU | 6080 | AAAAUACAGGUUAUGGCCA |
| siRNA 2445 | 2445 | GGCCAUAACCUGUAUUUUG | 6081 | CAAAAUACAGGUUAUGGCC |
| siRNA 2446 | 2446 | GCCAUAACCUGUAUUUUGA | 6082 | UCAAAAUACAGGUUAUGGC |
| siRNA 2447 | 2447 | CCAUAACCUGUAUUUUGAU | 6083 | AUCAAAAUACAGGUUAUGG |
| siRNA 2448 | 2448 | CAUAACCUGUAUUUUGAUA | 6084 | UAUCAAAAUACAGGUUAUG |
| siRNA 2449 | 2449 | AUAACCUGUAUUUUGAUAG | 6085 | CUAUCAAAAUACAGGUUAU |
| siRNA 2450 | 2450 | UAACCUGUAUUUUGAUAGA | 6086 | UCUAUCAAAAUACAGGUUA |
| siRNA 2451 | 2451 | AACCUGUAUUUUGAUAGAA | 6087 | UUCUAUCAAAAUACAGGUU |
| siRNA 2452 | 2452 | ACCUGUAUUUUGAUAGAAU | 6088 | AUUCUAUCAAAAUACAGGU |
| siRNA 2453 | 2453 | CCUGUAUUUUGAUAGAAUU | 6089 | AAUUCUAUCAAAAUACAGG |
| siRNA 2454 | 2454 | CUGUAUUUUGAUAGAAUUA | 6090 | UAAUUCUAUCAAAAUACAG |
| siRNA 2455 | 2455 | UGUAUUUUGAUAGAAUUAG | 6091 | CUAAUUCUAUCAAAAUACA |
| siRNA 2456 | 2456 | GUAUUUUGAUAGAAUUAGA | 6092 | UCUAAUUCUAUCAAAAUAC |
| siRNA 2457 | 2457 | UAUUUUGAUAGAAUUAGAU | 6093 | AUCUAAUUCUAUCAAAAUA |
| siRNA 2458 | 2458 | AUUUUGAUAGAAUUAGAUU | 6094 | AAUCUAAUUCUAUCAAAAU |
| siRNA 2459 | 2459 | UUUUGAUAGAAUUAGAUUG | 6095 | CAAUCUAAUUCUAUCAAAA |
| siRNA 2460 | 2460 | UUUGAUAGAAUUAGAUUGG | 6096 | CCAAUCUAAUUCUAUCAAA |
| siRNA 2461 | 2461 | UUGAUAGAAUUAGAUUGGU | 6097 | ACCAAUCUAAUUCUAUCAA |
| siRNA 2462 | 2462 | UGAUAGAAUUAGAUUGGUA | 6098 | UACCAAUCUAAUUCUAUCA |
| siRNA 2463 | 2463 | GAUAGAAUUAGAUUGGUAA | 6099 | UUACCAAUCUAAUUCUAUC |
| siRNA 2464 | 2464 | AUAGAAUUAGAUUGGUAAA | 6100 | UUUACCAAUCUAAUUCUAU |
| siRNA 2465 | 2465 | UAGAAUUAGAUUGGUAAAU | 6101 | AUUUACCAAUCUAAUUCUA |
| siRNA 2466 | 2466 | AGAAUUAGAUUGGUAAAUA | 6102 | UAUUUACCAAUCUAAUUCU |
| siRNA 2467 | 2467 | GAAUUAGAUUGGUAAAUAC | 6103 | GUAUUUACCAAUCUAAUUC |
| siRNA 2468 | 2468 | AAUUAGAUUGGUAAAUACA | 6104 | UGUAUUUACCAAUCUAAUU |
| siRNA 2469 | 2469 | AUUAGAUUGGUAAAUACAU | 6105 | AUGUAUUUACCAAUCUAAU |
| siRNA 2470 | 2470 | UUAGAUUGGUAAAUACAUG | 6106 | CAUGUAUUUACCAAUCUAA |
| siRNA 2471 | 2471 | UAGAUUGGUAAAUACAUGU | 6107 | ACAUGUAUUUACCAAUCUA |
| siRNA 2472 | 2472 | AGAUUGGUAAAUACAUGUA | 6108 | UACAUGUAUUUACCAAUCU |
| siRNA 2473 | 2473 | GAUUGGUAAAUACAUGUAU | 6109 | AUACAUGUAUUUACCAAUC |
| siRNA 2474 | 2474 | AUUGGUAAAUACAUGUAUU | 6110 | AAUACAUGUAUUUACCAAU |
| siRNA 2475 | 2475 | UUGGUAAAUACAUGUAUUC | 6111 | GAAUACAUGUAUUUACCAA |
| siRNA 2476 | 2476 | UGGUAAAUACAUGUAUUCA | 6112 | UGAAUACAUGUAUUUACCA |
| siRNA 2477 | 2477 | GGUAAAUACAUGUAUUCAU | 6113 | AUGAAUACAUGUAUUUACC |
| siRNA 2478 | 2478 | GUAAAUACAUGUAUUCAUA | 6114 | UAUGAAUACAUGUAUUUAC |
| siRNA 2479 | 2479 | UAAAUACAUGUAUUCAUAC | 6115 | GUAUGAAUACAUGUAUUUA |
| siRNA 2480 | 2480 | AAAUACAUGUAUUCAUACA | 6116 | UGUAUGAAUACAUGUAUUU |
| siRNA 2481 | 2481 | AAUACAUGUAUUCAUACAU | 6117 | AUGUAUGAAUACAUGUAUU |
| siRNA 2482 | 2482 | AUACAUGUAUUCAUACAUA | 6118 | UAUGUAUGAAUACAUGUAU |
| siRNA 2483 | 2483 | UACAUGUAUUCAUACAUAC | 6119 | GUAUGUAUGAAUACAUGUA |
| siRNA 2484 | 2484 | ACAUGUAUUCAUACAUACU | 6120 | AGUAUGUAUGAAUACAUGU |
| siRNA 2485 | 2485 | CAUGUAUUCAUACAUACUC | 6121 | GAGUAUGUAUGAAUACAUG |
| siRNA 2486 | 2486 | AUGUAUUCAUACAUACUCU | 6122 | AGAGUAUGUAUGAAUACAU |
| siRNA 2487 | 2487 | UGUAUUCAUACAUACUCUG | 6123 | CAGAGUAUGUAUGAAUACA |
| siRNA 2488 | 2488 | GUAUUCAUACAUACUCUGU | 6124 | ACAGAGUAUGUAUGAAUAC |
| siRNA 2489 | 2489 | UAUUCAUACAUACUCUGUG | 6125 | CACAGAGUAUGUAUGAAUA |
| siRNA 2490 | 2490 | AUUCAUACAUACUCUGUGG | 6126 | CCACAGAGUAUGUAUGAAU |
| siRNA 2491 | 2491 | UUCAUACAUACUCUGUGGU | 6127 | ACCACAGAGUAUGUAUGAA |
| siRNA 2492 | 2492 | UCAUACAUACUCUGUGGUA | 6128 | UACCACAGAGUAUGUAUGA |
| siRNA 2493 | 2493 | CAUACAUACUCUGUGGUAA | 6129 | UUACCACAGAGUAUGUAUG |
| siRNA 2494 | 2494 | AUACAUACUCUGUGGUAAU | 6130 | AUUACCACAGAGUAUGUAU |
| siRNA 2495 | 2495 | UACAUACUCUGUGGUAAUA | 6131 | UAUUACCACAGAGUAUGUA |
| siRNA 2496 | 2496 | ACAUACUCUGUGGUAAUAG | 6132 | CUAUUACCACAGAGUAUGU |
| siRNA 2497 | 2497 | CAUACUCUGUGGUAAUAGA | 6133 | UCUAUUACCACAGAGUAUG |
| siRNA 2498 | 2498 | AUACUCUGUGGUAAUAGAG | 6134 | CUCUAUUACCACAGAGUAU |
| siRNA 2499 | 2499 | UACUCUGUGGUAAUAGAGA | 6135 | UCUCUAUUACCACAGAGUA |
| siRNA 2500 | 2500 | ACUCUGUGGUAAUAGAGAC | 6136 | GUCUCUAUUACCACAGAGU |
| siRNA 2501 | 2501 | CUCUGUGGUAAUAGAGACU | 6137 | AGUCUCUAUUACCACAGAG |
| siRNA 2502 | 2502 | UCUGUGGUAAUAGAGACUU | 6138 | AAGUCUCUAUUACCACAGA |
| siRNA 2503 | 2503 | CUGUGGUAAUAGAGACUUG | 6139 | CAAGUCUCUAUUACCACAG |
| siRNA 2504 | 2504 | UGUGGUAAUAGAGACUUGA | 6140 | UCAAGUCUCUAUUACCACA |
| siRNA 2505 | 2505 | GUGGUAAUAGAGACUUGAG | 6141 | CUCAAGUCUCUAUUACCAC |
| siRNA 2506 | 2506 | UGGUAAUAGAGACUUGAGC | 6142 | GCUCAAGUCUCUAUUACCA |
| siRNA 2507 | 2507 | GGUAAUAGAGACUUGAGCU | 6143 | AGCUCAAGUCUCUAUUACC |
| siRNA 2508 | 2508 | GUAAUAGAGACUUGAGCUG | 6144 | CAGCUCAAGUCUCUAUUAC |
| siRNA 2509 | 2509 | UAAUAGAGACUUGAGCUGG | 6145 | CCAGCUCAAGUCUCUAUUA |
| siRNA 2510 | 2510 | AAUAGAGACUUGAGCUGGA | 6146 | UCCAGCUCAAGUCUCUAUU |
| siRNA 2511 | 2511 | AUAGAGACUUGAGCUGGAU | 6147 | AUCCAGCUCAAGUCUCUAU |
| siRNA 2512 | 2512 | UAGAGACUUGAGCUGGAUC | 6148 | GAUCCAGCUCAAGUCUCUA |
| siRNA 2513 | 2513 | AGAGACUUGAGCUGGAUCU | 6149 | AGAUCCAGCUCAAGUCUCU |
| siRNA 2514 | 2514 | GAGACUUGAGCUGGAUCUG | 6150 | CAGAUCCAGCUCAAGUCUC |
| siRNA 2515 | 2515 | AGACUUGAGCUGGAUCUGU | 6151 | ACAGAUCCAGCUCAAGUCU |
| siRNA 2516 | 2516 | GACUUGAGCUGGAUCUGUA | 6152 | UACAGAUCCAGCUCAAGUC |
| siRNA 2517 | 2517 | ACUUGAGCUGGAUCUGUAC | 6153 | GUACAGAUCCAGCUCAAGU |
| siRNA 2518 | 2518 | CUUGAGCUGGAUCUGUACU | 6154 | AGUACAGAUCCAGCUCAAG |
| siRNA 2519 | 2519 | UUGAGCUGGAUCUGUACUG | 6155 | CAGUACAGAUCCAGCUCAA |
| siRNA 2520 | 2520 | UGAGCUGGAUCUGUACUGC | 6156 | GCAGUACAGAUCCAGCUCA |
| siRNA 2521 | 2521 | GAGCUGGAUCUGUACUGCA | 6157 | UGCAGUACAGAUCCAGCUC |
| siRNA 2522 | 2522 | AGCUGGAUCUGUACUGCAC | 6158 | GUGCAGUACAGAUCCAGCU |
| siRNA 2523 | 2523 | GCUGGAUCUGUACUGCACU | 6159 | AGUGCAGUACAGAUCCAGC |
| siRNA 2524 | 2524 | CUGGAUCUGUACUGCACUG | 6160 | CAGUGCAGUACAGAUCCAG |
| siRNA 2525 | 2525 | UGGAUCUGUACUGCACUGG | 6161 | CCAGUGCAGUACAGAUCCA |
| siRNA 2526 | 2526 | GGAUCUGUACUGCACUGGA | 6162 | UCCAGUGCAGUACAGAUCC |
| siRNA 2527 | 2527 | GAUCUGUACUGCACUGGAG | 6163 | CUCCAGUGCAGUACAGAUC |
| siRNA 2528 | 2528 | AUCUGUACUGCACUGGAGU | 6164 | ACUCCAGUGCAGUACAGAU |
| siRNA 2529 | 2529 | UCUGUACUGCACUGGAGUA | 6165 | UACUCCAGUGCAGUACAGA |
| siRNA 2530 | 2530 | CUGUACUGCACUGGAGUAA | 6166 | UUACUCCAGUGCAGUACAG |
| siRNA 2531 | 2531 | UGUACUGCACUGGAGUAAG | 6167 | CUUACUCCAGUGCAGUACA |
| siRNA 2532 | 2532 | GUACUGCACUGGAGUAAGC | 6168 | GCUUACUCCAGUGCAGUAC |
| siRNA 2533 | 2533 | UACUGCACUGGAGUAAGCA | 6169 | UGCUUACUCCAGUGCAGUA |
| siRNA 2534 | 2534 | ACUGCACUGGAGUAAGCAA | 6170 | UUGCUUACUCCAGUGCAGU |
| siRNA 2535 | 2535 | CUGCACUGGAGUAAGCAAG | 6171 | CUUGCUUACUCCAGUGCAG |
| siRNA 2536 | 2536 | UGCACUGGAGUAAGCAAGA | 6172 | UCUUGCUUACUCCAGUGCA |
| siRNA 2537 | 2537 | GCACUGGAGUAAGCAAGAA | 6173 | UUCUUGCUUACUCCAGUGC |
| siRNA 2538 | 2538 | CACUGGAGUAAGCAAGAAA | 6174 | UUUCUUGCUUACUCCAGUG |
| siRNA 2539 | 2539 | ACUGGAGUAAGCAAGAAAA | 6175 | UUUUCUUGCUUACUCCAGU |
| siRNA 2540 | 2540 | CUGGAGUAAGCAAGAAAAU | 6176 | AUUUUCUUGCUUACUCCAG |
| siRNA 2541 | 2541 | UGGAGUAAGCAAGAAAAUU | 6177 | AAUUUUCUUGCUUACUCCA |
| siRNA 2542 | 2542 | GGAGUAAGCAAGAAAAUUG | 6178 | CAAUUUUCUUGCUUACUCC |
| siRNA 2543 | 2543 | GAGUAAGCAAGAAAAUUGG | 6179 | CCAAUUUUCUUGCUUACUC |
| siRNA 2544 | 2544 | AGUAAGCAAGAAAAUUGGG | 6180 | CCCAAUUUUCUUGCUUACU |
| siRNA 2545 | 2545 | GUAAGCAAGAAAAUUGGGA | 6181 | UCCCAAUUUUCUUGCUUAC |
| siRNA 2546 | 2546 | UAAGCAAGAAAAUUGGGAA | 6182 | UUCCCAAUUUUCUUGCUUA |
| siRNA 2547 | 2547 | AAGCAAGAAAAUUGGGAAA | 6183 | UUUCCCAAUUUUCUUGCUU |
| siRNA 2548 | 2548 | AGCAAGAAAAUUGGGAAAA | 6184 | UUUUCCCAAUUUUCUUGCU |
| siRNA 2549 | 2549 | GCAAGAAAAUUGGGAAAAC | 6185 | GUUUUCCCAAUUUUCUUGC |
| siRNA 2550 | 2550 | CAAGAAAAUUGGGAAAACU | 6186 | AGUUUUCCCAAUUUUCUUG |
| siRNA 2551 | 2551 | AAGAAAAUUGGGAAAACUU | 6187 | AAGUUUUCCCAAUUUUCUU |
| siRNA 2552 | 2552 | AGAAAAUUGGGAAAACUUU | 6188 | AAAGUUUUCCCAAUUUUCU |
| siRNA 2553 | 2553 | GAAAAUUGGGAAAACUUUU | 6189 | AAAAGUUUUCCCAAUUUUC |
| siRNA 2554 | 2554 | AAAAUUGGGAAAACUUUUU | 6190 | AAAAAGUUUUCCCAAUUUU |
| siRNA 2555 | 2555 | AAAUUGGGAAAACUUUUUC | 6191 | GAAAAAGUUUUCCCAAUUU |
| siRNA 2556 | 2556 | AAUUGGGAAAACUUUUUCG | 6192 | CGAAAAAGUUUUCCCAAUU |
| siRNA 2557 | 2557 | AUUGGGAAAACUUUUUCGU | 6193 | ACGAAAAAGUUUUCCCAAU |
| siRNA 2558 | 2558 | UUGGGAAAACUUUUUCGUU | 6194 | AACGAAAAAGUUUUCCCAA |
| siRNA 2559 | 2559 | UGGGAAAACUUUUUCGUUU | 6195 | AAACGAAAAAGUUUUCCCA |
| siRNA 2560 | 2560 | GGGAAAACUUUUUCGUUUG | 6196 | CAAACGAAAAAGUUUUCCC |
| siRNA 2561 | 2561 | GGAAAACUUUUUCGUUUGU | 6197 | ACAAACGAAAAAGUUUUCC |
| siRNA 2562 | 2562 | GAAAACUUUUUCGUUUGUU | 6198 | AACAAACGAAAAAGUUUUC |
| siRNA 2563 | 2563 | AAAACUUUUUCGUUUGUUC | 6199 | GAACAAACGAAAAAGUUUU |
| siRNA 2564 | 2564 | AAACUUUUUCGUUUGUUCA | 6200 | UGAACAAACGAAAAAGUUU |
| siRNA 2565 | 2565 | AACUUUUUCGUUUGUUCAG | 6201 | CUGAACAAACGAAAAAGUU |
| siRNA 2566 | 2566 | ACUUUUUCGUUUGUUCAGG | 6202 | CCUGAACAAACGAAAAAGU |
| siRNA 2567 | 2567 | CUUUUUCGUUUGUUCAGGU | 6203 | ACCUGAACAAACGAAAAAG |
| siRNA 2568 | 2568 | UUUUUCGUUUGUUCAGGUU | 6204 | AACCUGAACAAACGAAAAA |
| siRNA 2569 | 2569 | UUUUCGUUUGUUCAGGUUU | 6205 | AAACCUGAACAAACGAAAA |
| siRNA 2570 | 2570 | UUUCGUUUGUUCAGGUUUU | 6206 | AAAACCUGAACAAACGAAA |
| siRNA 2571 | 2571 | UUCGUUUGUUCAGGUUUUG | 6207 | CAAAACCUGAACAAACGAA |
| siRNA 2572 | 2572 | UCGUUUGUUCAGGUUUUGG | 6208 | CCAAAACCUGAACAAACGA |
| siRNA 2573 | 2573 | CGUUUGUUCAGGUUUUGGC | 6209 | GCCAAAACCUGAACAAACG |
| siRNA 2574 | 2574 | GUUUGUUCAGGUUUUGGCA | 6210 | UGCCAAAACCUGAACAAAC |
| siRNA 2575 | 2575 | UUUGUUCAGGUUUUGGCAA | 6211 | UUGCCAAAACCUGAACAAA |
| siRNA 2576 | 2576 | UUGUUCAGGUUUUGGCAAC | 6212 | GUUGCCAAAACCUGAACAA |
| siRNA 2577 | 2577 | UGUUCAGGUUUUGGCAACA | 6213 | UGUUGCCAAAACCUGAACA |
| siRNA 2578 | 2578 | GUUCAGGUUUUGGCAACAC | 6214 | GUGUUGCCAAAACCUGAAC |
| siRNA 2579 | 2579 | UUCAGGUUUUGGCAACACA | 6215 | UGUGUUGCCAAAACCUGAA |
| siRNA 2580 | 2580 | UCAGGUUUUGGCAACACAU | 6216 | AUGUGUUGCCAAAACCUGA |
| siRNA 2581 | 2581 | CAGGUUUUGGCAACACAUA | 6217 | UAUGUGUUGCCAAAACCUG |
| siRNA 2582 | 2582 | AGGUUUUGGCAACACAUAG | 6218 | CUAUGUGUUGCCAAAACCU |
| siRNA 2583 | 2583 | GGUUUUGGCAACACAUAGA | 6219 | UCUAUGUGUUGCCAAAACC |
| siRNA 2584 | 2584 | GUUUUGGCAACACAUAGAU | 6220 | AUCUAUGUGUUGCCAAAAC |
| siRNA 2585 | 2585 | UUUUGGCAACACAUAGAUC | 6221 | GAUCUAUGUGUUGCCAAAA |
| siRNA 2586 | 2586 | UUUGGCAACACAUAGAUCA | 6222 | UGAUCUAUGUGUUGCCAAA |
| siRNA 2587 | 2587 | UUGGCAACACAUAGAUCAU | 6223 | AUGAUCUAUGUGUUGCCAA |
| siRNA 2588 | 2588 | UGGCAACACAUAGAUCAUA | 6224 | UAUGAUCUAUGUGUUGCCA |
| siRNA 2589 | 2589 | GGCAACACAUAGAUCAUAU | 6225 | AUAUGAUCUAUGUGUUGCC |
| siRNA 2590 | 2590 | GCAACACAUAGAUCAUAUG | 6226 | CAUAUGAUCUAUGUGUUGC |
| siRNA 2591 | 2591 | CAACACAUAGAUCAUAUGU | 6227 | ACAUAUGAUCUAUGUGUUG |
| siRNA 2592 | 2592 | AACACAUAGAUCAUAUGUC | 6228 | GACAUAUGAUCUAUGUGUU |
| siRNA 2593 | 2593 | ACACAUAGAUCAUAUGUCU | 6229 | AGACAUAUGAUCUAUGUGU |
| siRNA 2594 | 2594 | CACAUAGAUCAUAUGUCUG | 6230 | CAGACAUAUGAUCUAUGUG |
| siRNA 2595 | 2595 | ACAUAGAUCAUAUGUCUGA | 6231 | UCAGACAUAUGAUCUAUGU |
| siRNA 2596 | 2596 | CAUAGAUCAUAUGUCUGAG | 6232 | CUCAGACAUAUGAUCUAUG |
| siRNA 2597 | 2597 | AUAGAUCAUAUGUCUGAGG | 6233 | CCUCAGACAUAUGAUCUAU |
| siRNA 2598 | 2598 | UAGAUCAUAUGUCUGAGGC | 6234 | GCCUCAGACAUAUGAUCUA |
| siRNA 2599 | 2599 | AGAUCAUAUGUCUGAGGCA | 6235 | UGCCUCAGACAUAUGAUCU |
| siRNA 2600 | 2600 | GAUCAUAUGUCUGAGGCAC | 6236 | GUGCCUCAGACAUAUGAUC |
| siRNA 2601 | 2601 | AUCAUAUGUCUGAGGCACA | 6237 | UGUGCCUCAGACAUAUGAU |
| siRNA 2602 | 2602 | UCAUAUGUCUGAGGCACAA | 6238 | UUGUGCCUCAGACAUAUGA |
| siRNA 2603 | 2603 | CAUAUGUCUGAGGCACAAG | 6239 | CUUGUGCCUCAGACAUAUG |
| siRNA 2604 | 2604 | AUAUGUCUGAGGCACAAGU | 6240 | ACUUGUGCCUCAGACAUAU |
| siRNA 2605 | 2605 | UAUGUCUGAGGCACAAGUU | 6241 | AACUUGUGCCUCAGACAUA |
| siRNA 2606 | 2606 | AUGUCUGAGGCACAAGUUG | 6242 | CAACUUGUGCCUCAGACAU |
| siRNA 2607 | 2607 | UGUCUGAGGCACAAGUUGG | 6243 | CCAACUUGUGCCUCAGACA |
| siRNA 2608 | 2608 | GUCUGAGGCACAAGUUGGC | 6244 | GCCAACUUGUGCCUCAGAC |
| siRNA 2609 | 2609 | UCUGAGGCACAAGUUGGCU | 6245 | AGCCAACUUGUGCCUCAGA |
| siRNA 2610 | 2610 | CUGAGGCACAAGUUGGCUG | 6246 | CAGCCAACUUGUGCCUCAG |
| siRNA 2611 | 2611 | UGAGGCACAAGUUGGCUGU | 6247 | ACAGCCAACUUGUGCCUCA |
| siRNA 2612 | 2612 | GAGGCACAAGUUGGCUGUU | 6248 | AACAGCCAACUUGUGCCUC |
| siRNA 2613 | 2613 | AGGCACAAGUUGGCUGUUC | 6249 | GAACAGCCAACUUGUGCCU |
| siRNA 2614 | 2614 | GGCACAAGUUGGCUGUUCA | 6250 | UGAACAGCCAACUUGUGCC |
| siRNA 2615 | 2615 | GCACAAGUUGGCUGUUCAU | 6251 | AUGAACAGCCAACUUGUGC |
| siRNA 2616 | 2616 | CACAAGUUGGCUGUUCAUC | 6252 | GAUGAACAGCCAACUUGUG |
| siRNA 2617 | 2617 | ACAAGUUGGCUGUUCAUCU | 6253 | AGAUGAACAGCCAACUUGU |
| siRNA 2618 | 2618 | CAAGUUGGCUGUUCAUCUU | 6254 | AAGAUGAACAGCCAACUUG |
| siRNA 2619 | 2619 | AAGUUGGCUGUUCAUCUUU | 6255 | AAAGAUGAACAGCCAACUU |
| siRNA 2620 | 2620 | AGUUGGCUGUUCAUCUUUG | 6256 | CAAAGAUGAACAGCCAACU |
| siRNA 2621 | 2621 | GUUGGCUGUUCAUCUUUGA | 6257 | UCAAAGAUGAACAGCCAAC |
| siRNA 2622 | 2622 | UUGGCUGUUCAUCUUUGAA | 6258 | UUCAAAGAUGAACAGCCAA |
| siRNA 2623 | 2623 | UGGCUGUUCAUCUUUGAAA | 6259 | UUUCAAAGAUGAACAGCCA |
| siRNA 2624 | 2624 | GGCUGUUCAUCUUUGAAAC | 6260 | GUUUCAAAGAUGAACAGCC |
| siRNA 2625 | 2625 | GCUGUUCAUCUUUGAAACC | 6261 | GGUUUCAAAGAUGAACAGC |
| siRNA 2626 | 2626 | CUGUUCAUCUUUGAAACCA | 6262 | UGGUUUCAAAGAUGAACAG |
| siRNA 2627 | 2627 | UGUUCAUCUUUGAAACCAG | 6263 | CUGGUUUCAAAGAUGAACA |
| siRNA 2628 | 2628 | GUUCAUCUUUGAAACCAGG | 6264 | CCUGGUUUCAAAGAUGAAC |
| siRNA 2629 | 2629 | UUCAUCUUUGAAACCAGGG | 6265 | CCCUGGUUUCAAAGAUGAA |
| siRNA 2630 | 2630 | UCAUCUUUGAAACCAGGGG | 6266 | CCCCUGGUUUCAAAGAUGA |
| siRNA 2631 | 2631 | CAUCUUUGAAACCAGGGGA | 6267 | UCCCCUGGUUUCAAAGAUG |
| siRNA 2632 | 2632 | AUCUUUGAAACCAGGGGAU | 6268 | AUCCCCUGGUUUCAAAGAU |
| siRNA 2633 | 2633 | UCUUUGAAACCAGGGGAUG | 6269 | CAUCCCCUGGUUUCAAAGA |
| siRNA 2634 | 2634 | CUUUGAAACCAGGGGAUGC | 6270 | GCAUCCCCUGGUUUCAAAG |
| siRNA 2635 | 2635 | UUUGAAACCAGGGGAUGCA | 6271 | UGCAUCCCCUGGUUUCAAA |
| siRNA 2636 | 2636 | UUGAAACCAGGGGAUGCAC | 6272 | GUGCAUCCCCUGGUUUCAA |
| siRNA 2637 | 2637 | UGAAACCAGGGGAUGCACA | 6273 | UGUGCAUCCCCUGGUUUCA |
| siRNA 2638 | 2638 | GAAACCAGGGGAUGCACAG | 6274 | CUGUGCAUCCCCUGGUUUC |
| siRNA 2639 | 2639 | AAACCAGGGGAUGCACAGU | 6275 | ACUGUGCAUCCCCUGGUUU |
| siRNA 2640 | 2640 | AACCAGGGGAUGCACAGUC | 6276 | GACUGUGCAUCCCCUGGUU |
| siRNA 2641 | 2641 | ACCAGGGGAUGCACAGUCU | 6277 | AGACUGUGCAUCCCCUGGU |
| siRNA 2642 | 2642 | CCAGGGGAUGCACAGUCUA | 6278 | UAGACUGUGCAUCCCCUGG |
| siRNA 2643 | 2643 | CAGGGGAUGCACAGUCUAA | 6279 | UUAGACUGUGCAUCCCCUG |
| siRNA 2644 | 2644 | AGGGGAUGCACAGUCUAAA | 6280 | UUUAGACUGUGCAUCCCCU |
| siRNA 2645 | 2645 | GGGGAUGCACAGUCUAAAU | 6281 | AUUUAGACUGUGCAUCCCC |
| siRNA 2646 | 2646 | GGGAUGCACAGUCUAAAUG | 6282 | CAUUUAGACUGUGCAUCCC |
| siRNA 2647 | 2647 | GGAUGCACAGUCUAAAUGA | 6283 | UCAUUUAGACUGUGCAUCC |
| siRNA 2648 | 2648 | GAUGCACAGUCUAAAUGAA | 6284 | UUCAUUUAGACUGUGCAUC |
| siRNA 2649 | 2649 | AUGCACAGUCUAAAUGAAU | 6285 | AUUCAUUUAGACUGUGCAU |
| siRNA 2650 | 2650 | UGCACAGUCUAAAUGAAUA | 6286 | UAUUCAUUUAGACUGUGCA |
| siRNA 2651 | 2651 | GCACAGUCUAAAUGAAUAU | 6287 | AUAUUCAUUUAGACUGUGC |
| siRNA 2652 | 2652 | CACAGUCUAAAUGAAUAUC | 6288 | GAUAUUCAUUUAGACUGUG |
| siRNA 2653 | 2653 | ACAGUCUAAAUGAAUAUCU | 6289 | AGAUAUUCAUUUAGACUGU |
| siRNA 2654 | 2654 | CAGUCUAAAUGAAUAUCUG | 6290 | CAGAUAUUCAUUUAGACUG |
| siRNA 2655 | 2655 | AGUCUAAAUGAAUAUCUGC | 6291 | GCAGAUAUUCAUUUAGACU |
| siRNA 2656 | 2656 | GUCUAAAUGAAUAUCUGCA | 6292 | UGCAGAUAUUCAUUUAGAC |
| siRNA 2657 | 2657 | UCUAAAUGAAUAUCUGCAU | 6293 | AUGCAGAUAUUCAUUUAGA |
| siRNA 2658 | 2658 | CUAAAUGAAUAUCUGCAUG | 6294 | CAUGCAGAUAUUCAUUUAG |
| siRNA 2659 | 2659 | UAAAUGAAUAUCUGCAUGG | 6295 | CCAUGCAGAUAUUCAUUUA |
| siRNA 2660 | 2660 | AAAUGAAUAUCUGCAUGGG | 6296 | CCCAUGCAGAUAUUCAUUU |
| siRNA 2661 | 2661 | AAUGAAUAUCUGCAUGGGA | 6297 | UCCCAUGCAGAUAUUCAUU |
| siRNA 2662 | 2662 | AUGAAUAUCUGCAUGGGAU | 6298 | AUCCCAUGCAGAUAUUCAU |
| siRNA 2663 | 2663 | UGAAUAUCUGCAUGGGAUU | 6299 | AAUCCCAUGCAGAUAUUCA |
| siRNA 2664 | 2664 | GAAUAUCUGCAUGGGAUUU | 6300 | AAAUCCCAUGCAGAUAUUC |
| siRNA 2665 | 2665 | AAUAUCUGCAUGGGAUUUG | 6301 | CAAAUCCCAUGCAGAUAUU |
| siRNA 2666 | 2666 | AUAUCUGCAUGGGAUUUGC | 6302 | GCAAAUCCCAUGCAGAUAU |
| siRNA 2667 | 2667 | UAUCUGCAUGGGAUUUGCU | 6303 | AGCAAAUCCCAUGCAGAUA |
| siRNA 2668 | 2668 | AUCUGCAUGGGAUUUGCUA | 6304 | UAGCAAAUCCCAUGCAGAU |
| siRNA 2669 | 2669 | UCUGCAUGGGAUUUGCUAU | 6305 | AUAGCAAAUCCCAUGCAGA |
| siRNA 2670 | 2670 | CUGCAUGGGAUUUGCUAUC | 6306 | GAUAGCAAAUCCCAUGCAG |
| siRNA 2671 | 2671 | UGCAUGGGAUUUGCUAUCA | 6307 | UGAUAGCAAAUCCCAUGCA |
| siRNA 2672 | 2672 | GCAUGGGAUUUGCUAUCAU | 6308 | AUGAUAGCAAAUCCCAUGC |
| siRNA 2673 | 2673 | CAUGGGAUUUGCUAUCAUA | 6309 | UAUGAUAGCAAAUCCCAUG |
| siRNA 2674 | 2674 | AUGGGAUUUGCUAUCAUAA | 6310 | UUAUGAUAGCAAAUCCCAU |
| siRNA 2675 | 2675 | UGGGAUUUGCUAUCAUAAU | 6311 | AUUAUGAUAGCAAAUCCCA |
| siRNA 2676 | 2676 | GGGAUUUGCUAUCAUAAUA | 6312 | UAUUAUGAUAGCAAAUCCC |
| siRNA 2677 | 2677 | GGAUUUGCUAUCAUAAUAU | 6313 | AUAUUAUGAUAGCAAAUCC |
| siRNA 2678 | 2678 | GAUUUGCUAUCAUAAUAUU | 6314 | AAUAUUAUGAUAGCAAAUC |
| siRNA 2679 | 2679 | AUUUGCUAUCAUAAUAUUU | 6315 | AAAUAUUAUGAUAGCAAAU |
| siRNA 2680 | 2680 | UUUGCUAUCAUAAUAUUUA | 6316 | UAAAUAUUAUGAUAGCAAA |
| siRNA 2681 | 2681 | UUGCUAUCAUAAUAUUUAC | 6317 | GUAAAUAUUAUGAUAGCAA |
| siRNA 2682 | 2682 | UGCUAUCAUAAUAUUUACU | 6318 | AGUAAAUAUUAUGAUAGCA |
| siRNA 2683 | 2683 | GCUAUCAUAAUAUUUACUA | 6319 | UAGUAAAUAUUAUGAUAGC |
| siRNA 2684 | 2684 | CUAUCAUAAUAUUUACUAU | 6320 | AUAGUAAAUAUUAUGAUAG |
| siRNA 2685 | 2685 | UAUCAUAAUAUUUACUAUG | 6321 | CAUAGUAAAUAUUAUGAUA |
| siRNA 2686 | 2686 | AUCAUAAUAUUUACUAUGC | 6322 | GCAUAGUAAAUAUUAUGAU |
| siRNA 2687 | 2687 | UCAUAAUAUUUACUAUGCA | 6323 | UGCAUAGUAAAUAUUAUGA |
| siRNA 2688 | 2688 | CAUAAUAUUUACUAUGCAG | 6324 | CUGCAUAGUAAAUAUUAUG |
| siRNA 2689 | 2689 | AUAAUAUUUACUAUGCAGA | 6325 | UCUGCAUAGUAAAUAUUAU |
| siRNA 2690 | 2690 | UAAUAUUUACUAUGCAGAU | 6326 | AUCUGCAUAGUAAAUAUUA |
| siRNA 2691 | 2691 | AAUAUUUACUAUGCAGAUG | 6327 | CAUCUGCAUAGUAAAUAUU |
| siRNA 2692 | 2692 | AUAUUUACUAUGCAGAUGA | 6328 | UCAUCUGCAUAGUAAAUAU |
| siRNA 2693 | 2693 | UAUUUACUAUGCAGAUGAA | 6329 | UUCAUCUGCAUAGUAAAUA |
| siRNA 2694 | 2694 | AUUUACUAUGCAGAUGAAU | 6330 | AUUCAUCUGCAUAGUAAAU |
| siRNA 2695 | 2695 | UUUACUAUGCAGAUGAAUU | 6331 | AAUUCAUCUGCAUAGUAAA |
| siRNA 2696 | 2696 | UUACUAUGCAGAUGAAUUC | 6332 | GAAUUCAUCUGCAUAGUAA |
| siRNA 2697 | 2697 | UACUAUGCAGAUGAAUUCA | 6333 | UGAAUUCAUCUGCAUAGUA |
| siRNA 2698 | 2698 | ACUAUGCAGAUGAAUUCAG | 6334 | CUGAAUUCAUCUGCAUAGU |
| siRNA 2699 | 2699 | CUAUGCAGAUGAAUUCAGU | 6335 | ACUGAAUUCAUCUGCAUAG |
| siRNA 2700 | 2700 | UAUGCAGAUGAAUUCAGUG | 6336 | CACUGAAUUCAUCUGCAUA |
| siRNA 2701 | 2701 | AUGCAGAUGAAUUCAGUGU | 6337 | ACACUGAAUUCAUCUGCAU |
| siRNA 2702 | 2702 | UGCAGAUGAAUUCAGUGUG | 6338 | CACACUGAAUUCAUCUGCA |
| siRNA 2703 | 2703 | GCAGAUGAAUUCAGUGUGA | 6339 | UCACACUGAAUUCAUCUGC |
| siRNA 2704 | 2704 | CAGAUGAAUUCAGUGUGAG | 6340 | CUCACACUGAAUUCAUCUG |
| siRNA 2705 | 2705 | AGAUGAAUUCAGUGUGAGG | 6341 | CCUCACACUGAAUUCAUCU |
| siRNA 2706 | 2706 | GAUGAAUUCAGUGUGAGGU | 6342 | ACCUCACACUGAAUUCAUC |
| siRNA 2707 | 2707 | AUGAAUUCAGUGUGAGGUC | 6343 | GACCUCACACUGAAUUCAU |
| siRNA 2708 | 2708 | UGAAUUCAGUGUGAGGUCC | 6344 | GGACCUCACACUGAAUUCA |
| siRNA 2709 | 2709 | GAAUUCAGUGUGAGGUCCU | 6345 | AGGACCUCACACUGAAUUC |
| siRNA 2710 | 2710 | AAUUCAGUGUGAGGUCCUG | 6346 | CAGGACCUCACACUGAAUU |
| siRNA 2711 | 2711 | AUUCAGUGUGAGGUCCUGU | 6347 | ACAGGACCUCACACUGAAU |
| siRNA 2712 | 2712 | UUCAGUGUGAGGUCCUGUG | 6348 | CACAGGACCUCACACUGAA |
| siRNA 2713 | 2713 | UCAGUGUGAGGUCCUGUGU | 6349 | ACACAGGACCUCACACUGA |
| siRNA 2714 | 2714 | CAGUGUGAGGUCCUGUGUC | 6350 | GACACAGGACCUCACACUG |
| siRNA 2715 | 2715 | AGUGUGAGGUCCUGUGUCC | 6351 | GGACACAGGACCUCACACU |
| siRNA 2716 | 2716 | GUGUGAGGUCCUGUGUCCG | 6352 | CGGACACAGGACCUCACAC |
| siRNA 2717 | 2717 | UGUGAGGUCCUGUGUCCGU | 6353 | ACGGACACAGGACCUCACA |
| siRNA 2718 | 2718 | GUGAGGUCCUGUGUCCGUA | 6354 | UACGGACACAGGACCUCAC |
| siRNA 2719 | 2719 | UGAGGUCCUGUGUCCGUAC | 6355 | GUACGGACACAGGACCUCA |
| siRNA 2720 | 2720 | GAGGUCCUGUGUCCGUACU | 6356 | AGUACGGACACAGGACCUC |
| siRNA 2721 | 2721 | AGGUCCUGUGUCCGUACUA | 6357 | UAGUACGGACACAGGACCU |
| siRNA 2722 | 2722 | GGUCCUGUGUCCGUACUAU | 6358 | AUAGUACGGACACAGGACC |
| siRNA 2723 | 2723 | GUCCUGUGUCCGUACUAUC | 6359 | GAUAGUACGGACACAGGAC |
| siRNA 2724 | 2724 | UCCUGUGUCCGUACUAUCC | 6360 | GGAUAGUACGGACACAGGA |
| siRNA 2725 | 2725 | CCUGUGUCCGUACUAUCCU | 6361 | AGGAUAGUACGGACACAGG |
| siRNA 2726 | 2726 | CUGUGUCCGUACUAUCCUC | 6362 | GAGGAUAGUACGGACACAG |
| siRNA 2727 | 2727 | UGUGUCCGUACUAUCCUCA | 6363 | UGAGGAUAGUACGGACACA |
| siRNA 2728 | 2728 | GUGUCCGUACUAUCCUCAA | 6364 | UUGAGGAUAGUACGGACAC |
| siRNA 2729 | 2729 | UGUCCGUACUAUCCUCAAA | 6365 | UUUGAGGAUAGUACGGACA |
| siRNA 2730 | 2730 | GUCCGUACUAUCCUCAAAU | 6366 | AUUUGAGGAUAGUACGGAC |
| siRNA 2731 | 2731 | UCCGUACUAUCCUCAAAUU | 6367 | AAUUUGAGGAUAGUACGGA |
| siRNA 2732 | 2732 | CCGUACUAUCCUCAAAUUA | 6368 | UAAUUUGAGGAUAGUACGG |
| siRNA 2733 | 2733 | CGUACUAUCCUCAAAUUAU | 6369 | AUAAUUUGAGGAUAGUACG |
| siRNA 2734 | 2734 | GUACUAUCCUCAAAUUAUU | 6370 | AAUAAUUUGAGGAUAGUAC |
| siRNA 2735 | 2735 | UACUAUCCUCAAAUUAUUU | 6371 | AAAUAAUUUGAGGAUAGUA |
| siRNA 2736 | 2736 | ACUAUCCUCAAAUUAUUUA | 6372 | UAAAUAAUUUGAGGAUAGU |
| siRNA 2737 | 2737 | CUAUCCUCAAAUUAUUUAU | 6373 | AUAAAUAAUUUGAGGAUAG |
| siRNA 2738 | 2738 | UAUCCUCAAAUUAUUUAUU | 6374 | AAUAAAUAAUUUGAGGAUA |
| siRNA 2739 | 2739 | AUCCUCAAAUUAUUUAUUU | 6375 | AAAUAAAUAAUUUGAGGAU |
| siRNA 2740 | 2740 | UCCUCAAAUUAUUUAUUUU | 6376 | AAAAUAAAUAAUUUGAGGA |
| siRNA 2741 | 2741 | CCUCAAAUUAUUUAUUUUA | 6377 | UAAAAUAAAUAAUUUGAGG |
| siRNA 2742 | 2742 | CUCAAAUUAUUUAUUUUAU | 6378 | AUAAAAUAAAUAAUUUGAG |
| siRNA 2743 | 2743 | UCAAAUUAUUUAUUUUAUA | 6379 | UAUAAAAUAAAUAAUUUGA |
| siRNA 2744 | 2744 | CAAAUUAUUUAUUUUAUAG | 6380 | CUAUAAAAUAAAUAAUUUG |
| siRNA 2745 | 2745 | AAAUUAUUUAUUUUAUAGU | 6381 | ACUAUAAAAUAAAUAAUUU |
| siRNA 2746 | 2746 | AAUUAUUUAUUUUAUAGUG | 6382 | CACUAUAAAAUAAAUAAUU |
| siRNA 2747 | 2747 | AUUAUUUAUUUUAUAGUGC | 6383 | GCACUAUAAAAUAAAUAAU |
| siRNA 2748 | 2748 | UUAUUUAUUUUAUAGUGCU | 6384 | AGCACUAUAAAAUAAAUAA |
| siRNA 2749 | 2749 | UAUUUAUUUUAUAGUGCUG | 6385 | CAGCACUAUAAAAUAAAUA |
| siRNA 2750 | 2750 | AUUUAUUUUAUAGUGCUGA | 6386 | UCAGCACUAUAAAAUAAAU |
| siRNA 2751 | 2751 | UUUAUUUUAUAGUGCUGAG | 6387 | CUCAGCACUAUAAAAUAAA |
| siRNA 2752 | 2752 | UUAUUUUAUAGUGCUGAGA | 6388 | UCUCAGCACUAUAAAAUAA |
| siRNA 2753 | 2753 | UAUUUUAUAGUGCUGAGAU | 6389 | AUCUCAGCACUAUAAAAUA |
| siRNA 2754 | 2754 | AUUUUAUAGUGCUGAGAUC | 6390 | GAUCUCAGCACUAUAAAAU |
| siRNA 2755 | 2755 | UUUUAUAGUGCUGAGAUCC | 6391 | GGAUCUCAGCACUAUAAAA |
| siRNA 2756 | 2756 | UUUAUAGUGCUGAGAUCCU | 6392 | AGGAUCUCAGCACUAUAAA |
| siRNA 2757 | 2757 | UUAUAGUGCUGAGAUCCUC | 6393 | GAGGAUCUCAGCACUAUAA |
| siRNA 2758 | 2758 | UAUAGUGCUGAGAUCCUCA | 6394 | UGAGGAUCUCAGCACUAUA |
| siRNA 2759 | 2759 | AUAGUGCUGAGAUCCUCAA | 6395 | UUGAGGAUCUCAGCACUAU |
| siRNA 2760 | 2760 | UAGUGCUGAGAUCCUCAAA | 6396 | UUUGAGGAUCUCAGCACUA |
| siRNA 2761 | 2761 | AGUGCUGAGAUCCUCAAAU | 6397 | AUUUGAGGAUCUCAGCACU |
| siRNA 2762 | 2762 | GUGCUGAGAUCCUCAAAUA | 6398 | UAUUUGAGGAUCUCAGCAC |
| siRNA 2763 | 2763 | UGCUGAGAUCCUCAAAUAA | 6399 | UUAUUUGAGGAUCUCAGCA |
| siRNA 2764 | 2764 | GCUGAGAUCCUCAAAUAAU | 6400 | AUUAUUUGAGGAUCUCAGC |
| siRNA 2765 | 2765 | CUGAGAUCCUCAAAUAAUC | 6401 | GAUUAUUUGAGGAUCUCAG |
| siRNA 2766 | 2766 | UGAGAUCCUCAAAUAAUCU | 6402 | AGAUUAUUUGAGGAUCUCA |
| siRNA 2767 | 2767 | GAGAUCCUCAAAUAAUCUC | 6403 | GAGAUUAUUUGAGGAUCUC |
| siRNA 2768 | 2768 | AGAUCCUCAAAUAAUCUCA | 6404 | UGAGAUUAUUUGAGGAUCU |
| siRNA 2769 | 2769 | GAUCCUCAAAUAAUCUCAA | 6405 | UUGAGAUUAUUUGAGGAUC |
| siRNA 2770 | 2770 | AUCCUCAAAUAAUCUCAAU | 6406 | AUUGAGAUUAUUUGAGGAU |
| siRNA 2771 | 2771 | UCCUCAAAUAAUCUCAAUU | 6407 | AAUUGAGAUUAUUUGAGGA |
| siRNA 2772 | 2772 | CCUCAAAUAAUCUCAAUUU | 6408 | AAAUUGAGAUUAUUUGAGG |
| siRNA 2773 | 2773 | CUCAAAUAAUCUCAAUUUC | 6409 | GAAAUUGAGAUUAUUUGAG |
| siRNA 2774 | 2774 | UCAAAUAAUCUCAAUUUCA | 6410 | UGAAAUUGAGAUUAUUUGA |
| siRNA 2775 | 2775 | CAAAUAAUCUCAAUUUCAG | 6411 | CUGAAAUUGAGAUUAUUUG |
| siRNA 2776 | 2776 | AAAUAAUCUCAAUUUCAGG | 6412 | CCUGAAAUUGAGAUUAUUU |
| siRNA 2777 | 2777 | AAUAAUCUCAAUUUCAGGA | 6413 | UCCUGAAAUUGAGAUUAUU |
| siRNA 2778 | 2778 | AUAAUCUCAAUUUCAGGAG | 6414 | CUCCUGAAAUUGAGAUUAU |
| siRNA 2779 | 2779 | UAAUCUCAAUUUCAGGAGG | 6415 | CCUCCUGAAAUUGAGAUUA |
| siRNA 2780 | 2780 | AAUCUCAAUUUCAGGAGGU | 6416 | ACCUCCUGAAAUUGAGAUU |
| siRNA 2781 | 2781 | AUCUCAAUUUCAGGAGGUU | 6417 | AACCUCCUGAAAUUGAGAU |
| siRNA 2782 | 2782 | UCUCAAUUUCAGGAGGUUU | 6418 | AAACCUCCUGAAAUUGAGA |
| siRNA 2783 | 2783 | CUCAAUUUCAGGAGGUUUC | 6419 | GAAACCUCCUGAAAUUGAG |
| siRNA 2784 | 2784 | UCAAUUUCAGGAGGUUUCA | 6420 | UGAAACCUCCUGAAAUUGA |
| siRNA 2785 | 2785 | CAAUUUCAGGAGGUUUCAC | 6421 | GUGAAACCUCCUGAAAUUG |
| siRNA 2786 | 2786 | AAUUUCAGGAGGUUUCACA | 6422 | UGUGAAACCUCCUGAAAUU |
| siRNA 2787 | 2787 | AUUUCAGGAGGUUUCACAA | 6423 | UUGUGAAACCUCCUGAAAU |
| siRNA 2788 | 2788 | UUUCAGGAGGUUUCACAAA | 6424 | UUUGUGAAACCUCCUGAAA |
| siRNA 2789 | 2789 | UUCAGGAGGUUUCACAAAA | 6425 | UUUUGUGAAACCUCCUGAA |
| siRNA 2790 | 2790 | UCAGGAGGUUUCACAAAAU | 6426 | AUUUUGUGAAACCUCCUGA |
| siRNA 2791 | 2791 | CAGGAGGUUUCACAAAAUG | 6427 | CAUUUUGUGAAACCUCCUG |
| siRNA 2792 | 2792 | AGGAGGUUUCACAAAAUGG | 6428 | CCAUUUUGUGAAACCUCCU |
| siRNA 2793 | 2793 | GGAGGUUUCACAAAAUGGA | 6429 | UCCAUUUUGUGAAACCUCC |
| siRNA 2794 | 2794 | GAGGUUUCACAAAAUGGAC | 6430 | GUCCAUUUUGUGAAACCUC |
| siRNA 2795 | 2795 | AGGUUUCACAAAAUGGACU | 6431 | AGUCCAUUUUGUGAAACCU |
| siRNA 2796 | 2796 | GGUUUCACAAAAUGGACUC | 6432 | GAGUCCAUUUUGUGAAACC |
| siRNA 2797 | 2797 | GUUUCACAAAAUGGACUCC | 6433 | GGAGUCCAUUUUGUGAAAC |
| siRNA 2798 | 2798 | UUUCACAAAAUGGACUCCU | 6434 | AGGAGUCCAUUUUGUGAAA |
| siRNA 2799 | 2799 | UUCACAAAAUGGACUCCUG | 6435 | CAGGAGUCCAUUUUGUGAA |
| siRNA 2800 | 2800 | UCACAAAAUGGACUCCUGA | 6436 | UCAGGAGUCCAUUUUGUGA |
| siRNA 2801 | 2801 | CACAAAAUGGACUCCUGAA | 6437 | UUCAGGAGUCCAUUUUGUG |
| siRNA 2802 | 2802 | ACAAAAUGGACUCCUGAAG | 6438 | CUUCAGGAGUCCAUUUUGU |
| siRNA 2803 | 2803 | CAAAAUGGACUCCUGAAGU | 6439 | ACUUCAGGAGUCCAUUUUG |
| siRNA 2804 | 2804 | AAAAUGGACUCCUGAAGUA | 6440 | UACUUCAGGAGUCCAUUUU |
| siRNA 2805 | 2805 | AAAUGGACUCCUGAAGUAG | 6441 | CUACUUCAGGAGUCCAUUU |
| siRNA 2806 | 2806 | AAUGGACUCCUGAAGUAGA | 6442 | UCUACUUCAGGAGUCCAUU |
| siRNA 2807 | 2807 | AUGGACUCCUGAAGUAGAC | 6443 | GUCUACUUCAGGAGUCCAU |
| siRNA 2808 | 2808 | UGGACUCCUGAAGUAGACA | 6444 | UGUCUACUUCAGGAGUCCA |
| siRNA 2809 | 2809 | GGACUCCUGAAGUAGACAG | 6445 | CUGUCUACUUCAGGAGUCC |
| siRNA 2810 | 2810 | GACUCCUGAAGUAGACAGA | 6446 | UCUGUCUACUUCAGGAGUC |
| siRNA 2811 | 2811 | ACUCCUGAAGUAGACAGAG | 6447 | CUCUGUCUACUUCAGGAGU |
| siRNA 2812 | 2812 | CUCCUGAAGUAGACAGAGU | 6448 | ACUCUGUCUACUUCAGGAG |
| siRNA 2813 | 2813 | UCCUGAAGUAGACAGAGUA | 6449 | UACUCUGUCUACUUCAGGA |
| siRNA 2814 | 2814 | CCUGAAGUAGACAGAGUAG | 6450 | CUACUCUGUCUACUUCAGG |
| siRNA 2815 | 2815 | CUGAAGUAGACAGAGUAGU | 6451 | ACUACUCUGUCUACUUCAG |
| siRNA 2816 | 2816 | UGAAGUAGACAGAGUAGUG | 6452 | CACUACUCUGUCUACUUCA |
| siRNA 2817 | 2817 | GAAGUAGACAGAGUAGUGA | 6453 | UCACUACUCUGUCUACUUC |
| siRNA 2818 | 2818 | AAGUAGACAGAGUAGUGAG | 6454 | CUCACUACUCUGUCUACUU |
| siRNA 2819 | 2819 | AGUAGACAGAGUAGUGAGG | 6455 | CCUCACUACUCUGUCUACU |
| siRNA 2820 | 2820 | GUAGACAGAGUAGUGAGGU | 6456 | ACCUCACUACUCUGUCUAC |
| siRNA 2821 | 2821 | UAGACAGAGUAGUGAGGUU | 6457 | AACCUCACUACUCUGUCUA |
| siRNA 2822 | 2822 | AGACAGAGUAGUGAGGUUU | 6458 | AAACCUCACUACUCUGUCU |
| siRNA 2823 | 2823 | GACAGAGUAGUGAGGUUUC | 6459 | GAAACCUCACUACUCUGUC |
| siRNA 2824 | 2824 | ACAGAGUAGUGAGGUUUCA | 6460 | UGAAACCUCACUACUCUGU |
| siRNA 2825 | 2825 | CAGAGUAGUGAGGUUUCAU | 6461 | AUGAAACCUCACUACUCUG |
| siRNA 2826 | 2826 | AGAGUAGUGAGGUUUCAUU | 6462 | AAUGAAACCUCACUACUCU |
| siRNA 2827 | 2827 | GAGUAGUGAGGUUUCAUUG | 6463 | CAAUGAAACCUCACUACUC |
| siRNA 2828 | 2828 | AGUAGUGAGGUUUCAUUGC | 6464 | GCAAUGAAACCUCACUACU |
| siRNA 2829 | 2829 | GUAGUGAGGUUUCAUUGCC | 6465 | GGCAAUGAAACCUCACUAC |
| siRNA 2830 | 2830 | UAGUGAGGUUUCAUUGCCC | 6466 | GGGCAAUGAAACCUCACUA |
| siRNA 2831 | 2831 | AGUGAGGUUUCAUUGCCCU | 6467 | AGGGCAAUGAAACCUCACU |
| siRNA 2832 | 2832 | GUGAGGUUUCAUUGCCCUC | 6468 | GAGGGCAAUGAAACCUCAC |
| siRNA 2833 | 2833 | UGAGGUUUCAUUGCCCUCU | 6469 | AGAGGGCAAUGAAACCUCA |
| siRNA 2834 | 2834 | GAGGUUUCAUUGCCCUCUA | 6470 | UAGAGGGCAAUGAAACCUC |
| siRNA 2835 | 2835 | AGGUUUCAUUGCCCUCUAU | 6471 | AUAGAGGGCAAUGAAACCU |
| siRNA 2836 | 2836 | GGUUUCAUUGCCCUCUAUA | 6472 | UAUAGAGGGCAAUGAAACC |
| siRNA 2837 | 2837 | GUUUCAUUGCCCUCUAUAA | 6473 | UUAUAGAGGGCAAUGAAAC |
| siRNA 2838 | 2838 | UUUCAUUGCCCUCUAUAAG | 6474 | CUUAUAGAGGGCAAUGAAA |
| siRNA 2839 | 2839 | UUCAUUGCCCUCUAUAAGC | 6475 | GCUUAUAGAGGGCAAUGAA |
| siRNA 2840 | 2840 | UCAUUGCCCUCUAUAAGCU | 6476 | AGCUUAUAGAGGGCAAUGA |
| siRNA 2841 | 2841 | CAUUGCCCUCUAUAAGCUU | 6477 | AAGCUUAUAGAGGGCAAUG |
| siRNA 2842 | 2842 | AUUGCCCUCUAUAAGCUUC | 6478 | GAAGCUUAUAGAGGGCAAU |
| siRNA 2843 | 2843 | UUGCCCUCUAUAAGCUUCU | 6479 | AGAAGCUUAUAGAGGGCAA |
| siRNA 2844 | 2844 | UGCCCUCUAUAAGCUUCUG | 6480 | CAGAAGCUUAUAGAGGGCA |
| siRNA 2845 | 2845 | GCCCUCUAUAAGCUUCUGA | 6481 | UCAGAAGCUUAUAGAGGGC |
| siRNA 2846 | 2846 | CCCUCUAUAAGCUUCUGAC | 6482 | GUCAGAAGCUUAUAGAGGG |
| siRNA 2847 | 2847 | CCUCUAUAAGCUUCUGACU | 6483 | AGUCAGAAGCUUAUAGAGG |
| siRNA 2848 | 2848 | CUCUAUAAGCUUCUGACUA | 6484 | UAGUCAGAAGCUUAUAGAG |
| siRNA 2849 | 2849 | UCUAUAAGCUUCUGACUAG | 6485 | CUAGUCAGAAGCUUAUAGA |
| siRNA 2850 | 2850 | CUAUAAGCUUCUGACUAGC | 6486 | GCUAGUCAGAAGCUUAUAG |
| siRNA 2851 | 2851 | UAUAAGCUUCUGACUAGCC | 6487 | GGCUAGUCAGAAGCUUAUA |
| siRNA 2852 | 2852 | AUAAGCUUCUGACUAGCCA | 6488 | UGGCUAGUCAGAAGCUUAU |
| siRNA 2853 | 2853 | UAAGCUUCUGACUAGCCAA | 6489 | UUGGCUAGUCAGAAGCUUA |
| siRNA 2854 | 2854 | AAGCUUCUGACUAGCCAAU | 6490 | AUUGGCUAGUCAGAAGCUU |
| siRNA 2855 | 2855 | AGCUUCUGACUAGCCAAUG | 6491 | CAUUGGCUAGUCAGAAGCU |
| siRNA 2856 | 2856 | GCUUCUGACUAGCCAAUGG | 6492 | CCAUUGGCUAGUCAGAAGC |
| siRNA 2857 | 2857 | CUUCUGACUAGCCAAUGGC | 6493 | GCCAUUGGCUAGUCAGAAG |
| siRNA 2858 | 2858 | UUCUGACUAGCCAAUGGCA | 6494 | UGCCAUUGGCUAGUCAGAA |
| siRNA 2859 | 2859 | UCUGACUAGCCAAUGGCAU | 6495 | AUGCCAUUGGCUAGUCAGA |
| siRNA 2860 | 2860 | CUGACUAGCCAAUGGCAUC | 6496 | GAUGCCAUUGGCUAGUCAG |
| siRNA 2861 | 2861 | UGACUAGCCAAUGGCAUCA | 6497 | UGAUGCCAUUGGCUAGUCA |
| siRNA 2862 | 2862 | GACUAGCCAAUGGCAUCAU | 6498 | AUGAUGCCAUUGGCUAGUC |
| siRNA 2863 | 2863 | ACUAGCCAAUGGCAUCAUC | 6499 | GAUGAUGCCAUUGGCUAGU |
| siRNA 2864 | 2864 | CUAGCCAAUGGCAUCAUCC | 6500 | GGAUGAUGCCAUUGGCUAG |
| siRNA 2865 | 2865 | UAGCCAAUGGCAUCAUCCA | 6501 | UGGAUGAUGCCAUUGGCUA |
| siRNA 2866 | 2866 | AGCCAAUGGCAUCAUCCAA | 6502 | UUGGAUGAUGCCAUUGGCU |
| siRNA 2867 | 2867 | GCCAAUGGCAUCAUCCAAU | 6503 | AUUGGAUGAUGCCAUUGGC |
| siRNA 2868 | 2868 | CCAAUGGCAUCAUCCAAUU | 6504 | AAUUGGAUGAUGCCAUUGG |
| siRNA 2869 | 2869 | CAAUGGCAUCAUCCAAUUU | 6505 | AAAUUGGAUGAUGCCAUUG |
| siRNA 2870 | 2870 | AAUGGCAUCAUCCAAUUUU | 6506 | AAAAUUGGAUGAUGCCAUU |
| siRNA 2871 | 2871 | AUGGCAUCAUCCAAUUUUC | 6507 | GAAAAUUGGAUGAUGCCAU |
| siRNA 2872 | 2872 | UGGCAUCAUCCAAUUUUCU | 6508 | AGAAAAUUGGAUGAUGCCA |
| siRNA 2873 | 2873 | GGCAUCAUCCAAUUUUCUU | 6509 | AAGAAAAUUGGAUGAUGCC |
| siRNA 2874 | 2874 | GCAUCAUCCAAUUUUCUUC | 6510 | GAAGAAAAUUGGAUGAUGC |
| siRNA 2875 | 2875 | CAUCAUCCAAUUUUCUUCC | 6511 | GGAAGAAAAUUGGAUGAUG |
| siRNA 2876 | 2876 | AUCAUCCAAUUUUCUUCCC | 6512 | GGGAAGAAAAUUGGAUGAU |
| siRNA 2877 | 2877 | UCAUCCAAUUUUCUUCCCA | 6513 | UGGGAAGAAAAUUGGAUGA |
| siRNA 2878 | 2878 | CAUCCAAUUUUCUUCCCAA | 6514 | UUGGGAAGAAAAUUGGAUG |
| siRNA 2879 | 2879 | AUCCAAUUUUCUUCCCAAA | 6515 | UUUGGGAAGAAAAUUGGAU |
| siRNA 2880 | 2880 | UCCAAUUUUCUUCCCAAAC | 6516 | GUUUGGGAAGAAAAUUGGA |
| siRNA 2881 | 2881 | CCAAUUUUCUUCCCAAACC | 6517 | GGUUUGGGAAGAAAAUUGG |
| siRNA 2882 | 2882 | CAAUUUUCUUCCCAAACCU | 6518 | AGGUUUGGGAAGAAAAUUG |
| siRNA 2883 | 2883 | AAUUUUCUUCCCAAACCUC | 6519 | GAGGUUUGGGAAGAAAAUU |
| siRNA 2884 | 2884 | AUUUUCUUCCCAAACCUCU | 6520 | AGAGGUUUGGGAAGAAAAU |
| siRNA 2885 | 2885 | UUUUCUUCCCAAACCUCUG | 6521 | CAGAGGUUUGGGAAGAAAA |
| siRNA 2886 | 2886 | UUUCUUCCCAAACCUCUGC | 6522 | GCAGAGGUUUGGGAAGAAA |
| siRNA 2887 | 2887 | UUCUUCCCAAACCUCUGCA | 6523 | UGCAGAGGUUUGGGAAGAA |
| siRNA 2888 | 2888 | UCUUCCCAAACCUCUGCAG | 6524 | CUGCAGAGGUUUGGGAAGA |
| siRNA 2889 | 2889 | CUUCCCAAACCUCUGCAGC | 6525 | GCUGCAGAGGUUUGGGAAG |
| siRNA 2890 | 2890 | UUCCCAAACCUCUGCAGCA | 6526 | UGCUGCAGAGGUUUGGGAA |
| siRNA 2891 | 2891 | UCCCAAACCUCUGCAGCAU | 6527 | AUGCUGCAGAGGUUUGGGA |
| siRNA 2892 | 2892 | CCCAAACCUCUGCAGCAUC | 6528 | GAUGCUGCAGAGGUUUGGG |
| siRNA 2893 | 2893 | CCAAACCUCUGCAGCAUCU | 6529 | AGAUGCUGCAGAGGUUUGG |
| siRNA 2894 | 2894 | CAAACCUCUGCAGCAUCUG | 6530 | CAGAUGCUGCAGAGGUUUG |
| siRNA 2895 | 2895 | AAACCUCUGCAGCAUCUGC | 6531 | GCAGAUGCUGCAGAGGUUU |
| siRNA 2896 | 2896 | AACCUCUGCAGCAUCUGCU | 6532 | AGCAGAUGCUGCAGAGGUU |
| siRNA 2897 | 2897 | ACCUCUGCAGCAUCUGCUU | 6533 | AAGCAGAUGCUGCAGAGGU |
| siRNA 2898 | 2898 | CCUCUGCAGCAUCUGCUUU | 6534 | AAAGCAGAUGCUGCAGAGG |
| siRNA 2899 | 2899 | CUCUGCAGCAUCUGCUUUA | 6535 | UAAAGCAGAUGCUGCAGAG |
| siRNA 2900 | 2900 | UCUGCAGCAUCUGCUUUAU | 6536 | AUAAAGCAGAUGCUGCAGA |
| siRNA 2901 | 2901 | CUGCAGCAUCUGCUUUAUU | 6537 | AAUAAAGCAGAUGCUGCAG |
| siRNA 2902 | 2902 | UGCAGCAUCUGCUUUAUUG | 6538 | CAAUAAAGCAGAUGCUGCA |
| siRNA 2903 | 2903 | GCAGCAUCUGCUUUAUUGC | 6539 | GCAAUAAAGCAGAUGCUGC |
| siRNA 2904 | 2904 | CAGCAUCUGCUUUAUUGCC | 6540 | GGCAAUAAAGCAGAUGCUG |
| siRNA 2905 | 2905 | AGCAUCUGCUUUAUUGCCA | 6541 | UGGCAAUAAAGCAGAUGCU |
| siRNA 2906 | 2906 | GCAUCUGCUUUAUUGCCAA | 6542 | UUGGCAAUAAAGCAGAUGC |
| siRNA 2907 | 2907 | CAUCUGCUUUAUUGCCAAA | 6543 | UUUGGCAAUAAAGCAGAUG |
| siRNA 2908 | 2908 | AUCUGCUUUAUUGCCAAAG | 6544 | CUUUGGCAAUAAAGCAGAU |
| siRNA 2909 | 2909 | UCUGCUUUAUUGCCAAAGG | 6545 | CCUUUGGCAAUAAAGCAGA |
| siRNA 2910 | 2910 | CUGCUUUAUUGCCAAAGGG | 6546 | CCCUUUGGCAAUAAAGCAG |
| siRNA 2911 | 2911 | UGCUUUAUUGCCAAAGGGC | 6547 | GCCCUUUGGCAAUAAAGCA |
| siRNA 2912 | 2912 | GCUUUAUUGCCAAAGGGCU | 6548 | AGCCCUUUGGCAAUAAAGC |
| siRNA 2913 | 2913 | CUUUAUUGCCAAAGGGCUA | 6549 | UAGCCCUUUGGCAAUAAAG |
| siRNA 2914 | 2914 | UUUAUUGCCAAAGGGCUAG | 6550 | CUAGCCCUUUGGCAAUAAA |
| siRNA 2915 | 2915 | UUAUUGCCAAAGGGCUAGU | 6551 | ACUAGCCCUUUGGCAAUAA |
| siRNA 2916 | 2916 | UAUUGCCAAAGGGCUAGUU | 6552 | AACUAGCCCUUUGGCAAUA |
| siRNA 2917 | 2917 | AUUGCCAAAGGGCUAGUUU | 6553 | AAACUAGCCCUUUGGCAAU |
| siRNA 2918 | 2918 | UUGCCAAAGGGCUAGUUUC | 6554 | GAAACUAGCCCUUUGGCAA |
| siRNA 2919 | 2919 | UGCCAAAGGGCUAGUUUCG | 6555 | CGAAACUAGCCCUUUGGCA |
| siRNA 2920 | 2920 | GCCAAAGGGCUAGUUUCGG | 6556 | CCGAAACUAGCCCUUUGGC |
| siRNA 2921 | 2921 | CCAAAGGGCUAGUUUCGGU | 6557 | ACCGAAACUAGCCCUUUGG |
| siRNA 2922 | 2922 | CAAAGGGCUAGUUUCGGUU | 6558 | AACCGAAACUAGCCCUUUG |
| siRNA 2923 | 2923 | AAAGGGCUAGUUUCGGUUU | 6559 | AAACCGAAACUAGCCCUUU |
| siRNA 2924 | 2924 | AAGGGCUAGUUUCGGUUUU | 6560 | AAAACCGAAACUAGCCCUU |
| siRNA 2925 | 2925 | AGGGCUAGUUUCGGUUUUC | 6561 | GAAAACCGAAACUAGCCCU |
| siRNA 2926 | 2926 | GGGCUAGUUUCGGUUUUCU | 6562 | AGAAAACCGAAACUAGCCC |
| siRNA 2927 | 2927 | GGCUAGUUUCGGUUUUCUG | 6563 | CAGAAAACCGAAACUAGCC |
| siRNA 2928 | 2928 | GCUAGUUUCGGUUUUCUGC | 6564 | GCAGAAAACCGAAACUAGC |
| siRNA 2929 | 2929 | CUAGUUUCGGUUUUCUGCA | 6565 | UGCAGAAAACCGAAACUAG |
| siRNA 2930 | 2930 | UAGUUUCGGUUUUCUGCAG | 6566 | CUGCAGAAAACCGAAACUA |
| siRNA 2931 | 2931 | AGUUUCGGUUUUCUGCAGC | 6567 | GCUGCAGAAAACCGAAACU |
| siRNA 2932 | 2932 | GUUUCGGUUUUCUGCAGCC | 6568 | GGCUGCAGAAAACCGAAAC |
| siRNA 2933 | 2933 | UUUCGGUUUUCUGCAGCCA | 6569 | UGGCUGCAGAAAACCGAAA |
| siRNA 2934 | 2934 | UUCGGUUUUCUGCAGCCAU | 6570 | AUGGCUGCAGAAAACCGAA |
| siRNA 2935 | 2935 | UCGGUUUUCUGCAGCCAUU | 6571 | AAUGGCUGCAGAAAACCGA |
| siRNA 2936 | 2936 | CGGUUUUCUGCAGCCAUUG | 6572 | CAAUGGCUGCAGAAAACCG |
| siRNA 2937 | 2937 | GGUUUUCUGCAGCCAUUGC | 6573 | GCAAUGGCUGCAGAAAACC |
| siRNA 2938 | 2938 | GUUUUCUGCAGCCAUUGCG | 6574 | CGCAAUGGCUGCAGAAAAC |
| siRNA 2939 | 2939 | UUUUCUGCAGCCAUUGCGG | 6575 | CCGCAAUGGCUGCAGAAAA |
| siRNA 2940 | 2940 | UUUCUGCAGCCAUUGCGGU | 6576 | ACCGCAAUGGCUGCAGAAA |
| siRNA 2941 | 2941 | UUCUGCAGCCAUUGCGGUU | 6577 | AACCGCAAUGGCUGCAGAA |
| siRNA 2942 | 2942 | UCUGCAGCCAUUGCGGUUA | 6578 | UAACCGCAAUGGCUGCAGA |
| siRNA 2943 | 2943 | CUGCAGCCAUUGCGGUUAA | 6579 | UUAACCGCAAUGGCUGCAG |
| siRNA 2944 | 2944 | UGCAGCCAUUGCGGUUAAA | 6580 | UUUAACCGCAAUGGCUGCA |
| siRNA 2945 | 2945 | GCAGCCAUUGCGGUUAAAA | 6581 | UUUUAACCGCAAUGGCUGC |
| siRNA 2946 | 2946 | CAGCCAUUGCGGUUAAAAA | 6582 | UUUUUAACCGCAAUGGCUG |
| siRNA 2947 | 2947 | AGCCAUUGCGGUUAAAAAA | 6583 | UUUUUUAACCGCAAUGGCU |
| siRNA 2948 | 2948 | GCCAUUGCGGUUAAAAAAU | 6584 | AUUUUUUAACCGCAAUGGC |
| siRNA 2949 | 2949 | CCAUUGCGGUUAAAAAAUA | 6585 | UAUUUUUUAACCGCAAUGG |
| siRNA 2950 | 2950 | CAUUGCGGUUAAAAAAUAU | 6586 | AUAUUUUUUAACCGCAAUG |
| siRNA 2951 | 2951 | AUUGCGGUUAAAAAAUAUA | 6587 | UAUAUUUUUUAACCGCAAU |
| siRNA 2952 | 2952 | UUGCGGUUAAAAAAUAUAA | 6588 | UUAUAUUUUUUAACCGCAA |
| siRNA 2953 | 2953 | UGCGGUUAAAAAAUAUAAG | 6589 | CUUAUAUUUUUUAACCGCA |
| siRNA 2954 | 2954 | GCGGUUAAAAAAUAUAAGU | 6590 | ACUUAUAUUUUUUAACCGC |
| siRNA 2955 | 2955 | CGGUUAAAAAAUAUAAGUA | 6591 | UACUUAUAUUUUUUAACCG |
| siRNA 2956 | 2956 | GGUUAAAAAAUAUAAGUAG | 6592 | CUACUUAUAUUUUUUAACC |
| siRNA 2957 | 2957 | GUUAAAAAAUAUAAGUAGG | 6593 | CCUACUUAUAUUUUUUAAC |
| siRNA 2958 | 2958 | UUAAAAAAUAUAAGUAGGA | 6594 | UCCUACUUAUAUUUUUUAA |
| siRNA 2959 | 2959 | UAAAAAAUAUAAGUAGGAU | 6595 | AUCCUACUUAUAUUUUUUA |
| siRNA 2960 | 2960 | AAAAAAUAUAAGUAGGAUA | 6596 | UAUCCUACUUAUAUUUUUU |
| siRNA 2961 | 2961 | AAAAAUAUAAGUAGGAUAA | 6597 | UUAUCCUACUUAUAUUUUU |
| siRNA 2962 | 2962 | AAAAUAUAAGUAGGAUAAC | 6598 | GUUAUCCUACUUAUAUUUU |
| siRNA 2963 | 2963 | AAAUAUAAGUAGGAUAACU | 6599 | AGUUAUCCUACUUAUAUUU |
| siRNA 2964 | 2964 | AAUAUAAGUAGGAUAACUU | 6600 | AAGUUAUCCUACUUAUAUU |
| siRNA 2965 | 2965 | AUAUAAGUAGGAUAACUUG | 6601 | CAAGUUAUCCUACUUAUAU |
| siRNA 2966 | 2966 | UAUAAGUAGGAUAACUUGU | 6602 | ACAAGUUAUCCUACUUAUA |
| siRNA 2967 | 2967 | AUAAGUAGGAUAACUUGUA | 6603 | UACAAGUUAUCCUACUUAU |
| siRNA 2968 | 2968 | UAAGUAGGAUAACUUGUAA | 6604 | UUACAAGUUAUCCUACUUA |
| siRNA 2969 | 2969 | AAGUAGGAUAACUUGUAAA | 6605 | UUUACAAGUUAUCCUACUU |
| siRNA 2970 | 2970 | AGUAGGAUAACUUGUAAAA | 6606 | UUUUACAAGUUAUCCUACU |
| siRNA 2971 | 2971 | GUAGGAUAACUUGUAAAAC | 6607 | GUUUUACAAGUUAUCCUAC |
| siRNA 2972 | 2972 | UAGGAUAACUUGUAAAACC | 6608 | GGUUUUACAAGUUAUCCUA |
| siRNA 2973 | 2973 | AGGAUAACUUGUAAAACCU | 6609 | AGGUUUUACAAGUUAUCCU |
| siRNA 2974 | 2974 | GGAUAACUUGUAAAACCUG | 6610 | CAGGUUUUACAAGUUAUCC |
| siRNA 2975 | 2975 | GAUAACUUGUAAAACCUGC | 6611 | GCAGGUUUUACAAGUUAUC |
| siRNA 2976 | 2976 | AUAACUUGUAAAACCUGCA | 6612 | UGCAGGUUUUACAAGUUAU |
| siRNA 2977 | 2977 | UAACUUGUAAAACCUGCAU | 6613 | AUGCAGGUUUUACAAGUUA |
| siRNA 2978 | 2978 | AACUUGUAAAACCUGCAUA | 6614 | UAUGCAGGUUUUACAAGUU |
| siRNA 2979 | 2979 | ACUUGUAAAACCUGCAUAU | 6615 | AUAUGCAGGUUUUACAAGU |
| siRNA 2980 | 2980 | CUUGUAAAACCUGCAUAUU | 6616 | AAUAUGCAGGUUUUACAAG |
| siRNA 2981 | 2981 | UUGUAAAACCUGCAUAUUG | 6617 | CAAUAUGCAGGUUUUACAA |
| siRNA 2982 | 2982 | UGUAAAACCUGCAUAUUGC | 6618 | GCAAUAUGCAGGUUUUACA |
| siRNA 2983 | 2983 | GUAAAACCUGCAUAUUGCU | 6619 | AGCAAUAUGCAGGUUUUAC |
| siRNA 2984 | 2984 | UAAAACCUGCAUAUUGCUA | 6620 | UAGCAAUAUGCAGGUUUUA |
| siRNA 2985 | 2985 | AAAACCUGCAUAUUGCUAA | 6621 | UUAGCAAUAUGCAGGUUUU |
| siRNA 2986 | 2986 | AAACCUGCAUAUUGCUAAU | 6622 | AUUAGCAAUAUGCAGGUUU |
| siRNA 2987 | 2987 | AACCUGCAUAUUGCUAAUC | 6623 | GAUUAGCAAUAUGCAGGUU |
| siRNA 2988 | 2988 | ACCUGCAUAUUGCUAAUCU | 6624 | AGAUUAGCAAUAUGCAGGU |
| siRNA 2989 | 2989 | CCUGCAUAUUGCUAAUCUA | 6625 | UAGAUUAGCAAUAUGCAGG |
| siRNA 2990 | 2990 | CUGCAUAUUGCUAAUCUAU | 6626 | AUAGAUUAGCAAUAUGCAG |
| siRNA 2991 | 2991 | UGCAUAUUGCUAAUCUAUA | 6627 | UAUAGAUUAGCAAUAUGCA |
| siRNA 2992 | 2992 | GCAUAUUGCUAAUCUAUAG | 6628 | CUAUAGAUUAGCAAUAUGC |
| siRNA 2993 | 2993 | CAUAUUGCUAAUCUAUAGA | 6629 | UCUAUAGAUUAGCAAUAUG |
| siRNA 2994 | 2994 | AUAUUGCUAAUCUAUAGAC | 6630 | GUCUAUAGAUUAGCAAUAU |
| siRNA 2995 | 2995 | UAUUGCUAAUCUAUAGACA | 6631 | UGUCUAUAGAUUAGCAAUA |
| siRNA 2996 | 2996 | AUUGCUAAUCUAUAGACAC | 6632 | GUGUCUAUAGAUUAGCAAU |
| siRNA 2997 | 2997 | UUGCUAAUCUAUAGACACC | 6633 | GGUGUCUAUAGAUUAGCAA |
| siRNA 2998 | 2998 | UGCUAAUCUAUAGACACCA | 6634 | UGGUGUCUAUAGAUUAGCA |
| siRNA 2999 | 2999 | GCUAAUCUAUAGACACCAC | 6635 | GUGGUGUCUAUAGAUUAGC |
| siRNA 3000 | 3000 | CUAAUCUAUAGACACCACA | 6636 | UGUGGUGUCUAUAGAUUAG |
| siRNA 3001 | 3001 | UAAUCUAUAGACACCACAG | 6637 | CUGUGGUGUCUAUAGAUUA |
| siRNA 3002 | 3002 | AAUCUAUAGACACCACAGU | 6638 | ACUGUGGUGUCUAUAGAUU |
| siRNA 3003 | 3003 | AUCUAUAGACACCACAGUU | 6639 | AACUGUGGUGUCUAUAGAU |
| siRNA 3004 | 3004 | UCUAUAGACACCACAGUUU | 6640 | AAACUGUGGUGUCUAUAGA |
| siRNA 3005 | 3005 | CUAUAGACACCACAGUUUC | 6641 | GAAACUGUGGUGUCUAUAG |
| siRNA 3006 | 3006 | UAUAGACACCACAGUUUCU | 6642 | AGAAACUGUGGUGUCUAUA |
| siRNA 3007 | 3007 | AUAGACACCACAGUUUCUA | 6643 | UAGAAACUGUGGUGUCUAU |
| siRNA 3008 | 3008 | UAGACACCACAGUUUCUAA | 6644 | UUAGAAACUGUGGUGUCUA |
| siRNA 3009 | 3009 | AGACACCACAGUUUCUAAA | 6645 | UUUAGAAACUGUGGUGUCU |
| siRNA 3010 | 3010 | GACACCACAGUUUCUAAAU | 6646 | AUUUAGAAACUGUGGUGUC |
| siRNA 3011 | 3011 | ACACCACAGUUUCUAAAUU | 6647 | AAUUUAGAAACUGUGGUGU |
| siRNA 3012 | 3012 | CACCACAGUUUCUAAAUUC | 6648 | GAAUUUAGAAACUGUGGUG |
| siRNA 3013 | 3013 | ACCACAGUUUCUAAAUUCU | 6649 | AGAAUUUAGAAACUGUGGU |
| siRNA 3014 | 3014 | CCACAGUUUCUAAAUUCUU | 6650 | AAGAAUUUAGAAACUGUGG |
| siRNA 3015 | 3015 | CACAGUUUCUAAAUUCUUU | 6651 | AAAGAAUUUAGAAACUGUG |
| siRNA 3016 | 3016 | ACAGUUUCUAAAUUCUUUG | 6652 | CAAAGAAUUUAGAAACUGU |
| siRNA 3017 | 3017 | CAGUUUCUAAAUUCUUUGA | 6653 | UCAAAGAAUUUAGAAACUG |
| siRNA 3018 | 3018 | AGUUUCUAAAUUCUUUGAA | 6654 | UUCAAAGAAUUUAGAAACU |
| siRNA 3019 | 3019 | GUUUCUAAAUUCUUUGAAA | 6655 | UUUCAAAGAAUUUAGAAAC |
| siRNA 3020 | 3020 | UUUCUAAAUUCUUUGAAAC | 6656 | GUUUCAAAGAAUUUAGAAA |
| siRNA 3021 | 3021 | UUCUAAAUUCUUUGAAACC | 6657 | GGUUUCAAAGAAUUUAGAA |
| siRNA 3022 | 3022 | UCUAAAUUCUUUGAAACCA | 6658 | UGGUUUCAAAGAAUUUAGA |
| siRNA 3023 | 3023 | CUAAAUUCUUUGAAACCAC | 6659 | GUGGUUUCAAAGAAUUUAG |
| siRNA 3024 | 3024 | UAAAUUCUUUGAAACCACU | 6660 | AGUGGUUUCAAAGAAUUUA |
| siRNA 3025 | 3025 | AAAUUCUUUGAAACCACUU | 6661 | AAGUGGUUUCAAAGAAUUU |
| siRNA 3026 | 3026 | AAUUCUUUGAAACCACUUU | 6662 | AAAGUGGUUUCAAAGAAUU |
| siRNA 3027 | 3027 | AUUCUUUGAAACCACUUUA | 6663 | UAAAGUGGUUUCAAAGAAU |
| siRNA 3028 | 3028 | UUCUUUGAAACCACUUUAC | 6664 | GUAAAGUGGUUUCAAAGAA |
| siRNA 3029 | 3029 | UCUUUGAAACCACUUUACU | 6665 | AGUAAAGUGGUUUCAAAGA |
| siRNA 3030 | 3030 | CUUUGAAACCACUUUACUA | 6666 | UAGUAAAGUGGUUUCAAAG |
| siRNA 3031 | 3031 | UUUGAAACCACUUUACUAC | 6667 | GUAGUAAAGUGGUUUCAAA |
| siRNA 3032 | 3032 | UUGAAACCACUUUACUACU | 6668 | AGUAGUAAAGUGGUUUCAA |
| siRNA 3033 | 3033 | UGAAACCACUUUACUACUU | 6669 | AAGUAGUAAAGUGGUUUCA |
| siRNA 3034 | 3034 | GAAACCACUUUACUACUUU | 6670 | AAAGUAGUAAAGUGGUUUC |
| siRNA 3035 | 3035 | AAACCACUUUACUACUUUU | 6671 | AAAAGUAGUAAAGUGGUUU |
| siRNA 3036 | 3036 | AACCACUUUACUACUUUUU | 6672 | AAAAAGUAGUAAAGUGGUU |
| siRNA 3037 | 3037 | ACCACUUUACUACUUUUUU | 6673 | AAAAAAGUAGUAAAGUGGU |
| siRNA 3038 | 3038 | CCACUUUACUACUUUUUUU | 6674 | AAAAAAAGUAGUAAAGUGG |
| siRNA 3039 | 3039 | CACUUUACUACUUUUUUUA | 6675 | UAAAAAAAGUAGUAAAGUG |
| siRNA 3040 | 3040 | ACUUUACUACUUUUUUUAA | 6676 | UUAAAAAAAGUAGUAAAGU |
| siRNA 3041 | 3041 | CUUUACUACUUUUUUUAAA | 6677 | UUUAAAAAAAGUAGUAAAG |
| siRNA 3042 | 3042 | UUUACUACUUUUUUUAAAC | 6678 | GUUUAAAAAAAGUAGUAAA |
| siRNA 3043 | 3043 | UUACUACUUUUUUUAAACU | 6679 | AGUUUAAAAAAAGUAGUAA |
| siRNA 3044 | 3044 | UACUACUUUUUUUAAACUU | 6680 | AAGUUUAAAAAAAGUAGUA |
| siRNA 3045 | 3045 | ACUACUUUUUUUAAACUUA | 6681 | UAAGUUUAAAAAAAGUAGU |
| siRNA 3046 | 3046 | CUACUUUUUUUAAACUUAA | 6682 | UUAAGUUUAAAAAAAGUAG |
| siRNA 3047 | 3047 | UACUUUUUUUAAACUUAAC | 6683 | GUUAAGUUUAAAAAAAGUA |
| siRNA 3048 | 3048 | ACUUUUUUUAAACUUAACU | 6684 | AGUUAAGUUUAAAAAAAGU |
| siRNA 3049 | 3049 | CUUUUUUUAAACUUAACUC | 6685 | GAGUUAAGUUUAAAAAAAG |
| siRNA 3050 | 3050 | UUUUUUUAAACUUAACUCA | 6686 | UGAGUUAAGUUUAAAAAAA |
| siRNA 3051 | 3051 | UUUUUUAAACUUAACUCAG | 6687 | CUGAGUUAAGUUUAAAAAA |
| siRNA 3052 | 3052 | UUUUUAAACUUAACUCAGU | 6688 | ACUGAGUUAAGUUUAAAAA |
| siRNA 3053 | 3053 | UUUUAAACUUAACUCAGUU | 6689 | AACUGAGUUAAGUUUAAAA |
| siRNA 3054 | 3054 | UUUAAACUUAACUCAGUUC | 6690 | GAACUGAGUUAAGUUUAAA |
| siRNA 3055 | 3055 | UUAAACUUAACUCAGUUCU | 6691 | AGAACUGAGUUAAGUUUAA |
| siRNA 3056 | 3056 | UAAACUUAACUCAGUUCUA | 6692 | UAGAACUGAGUUAAGUUUA |
| siRNA 3057 | 3057 | AAACUUAACUCAGUUCUAA | 6693 | UUAGAACUGAGUUAAGUUU |
| siRNA 3058 | 3058 | AACUUAACUCAGUUCUAAA | 6694 | UUUAGAACUGAGUUAAGUU |
| siRNA 3059 | 3059 | ACUUAACUCAGUUCUAAAU | 6695 | AUUUAGAACUGAGUUAAGU |
| siRNA 3060 | 3060 | CUUAACUCAGUUCUAAAUA | 6696 | UAUUUAGAACUGAGUUAAG |
| siRNA 3061 | 3061 | UUAACUCAGUUCUAAAUAC | 6697 | GUAUUUAGAACUGAGUUAA |
| siRNA 3062 | 3062 | UAACUCAGUUCUAAAUACU | 6698 | AGUAUUUAGAACUGAGUUA |
| siRNA 3063 | 3063 | AACUCAGUUCUAAAUACUU | 6699 | AAGUAUUUAGAACUGAGUU |
| siRNA 3064 | 3064 | ACUCAGUUCUAAAUACUUU | 6700 | AAAGUAUUUAGAACUGAGU |
| siRNA 3065 | 3065 | CUCAGUUCUAAAUACUUUG | 6701 | CAAAGUAUUUAGAACUGAG |
| siRNA 3066 | 3066 | UCAGUUCUAAAUACUUUGU | 6702 | ACAAAGUAUUUAGAACUGA |
| siRNA 3067 | 3067 | CAGUUCUAAAUACUUUGUC | 6703 | GACAAAGUAUUUAGAACUG |
| siRNA 3068 | 3068 | AGUUCUAAAUACUUUGUCU | 6704 | AGACAAAGUAUUUAGAACU |
| siRNA 3069 | 3069 | GUUCUAAAUACUUUGUCUG | 6705 | CAGACAAAGUAUUUAGAAC |
| siRNA 3070 | 3070 | UUCUAAAUACUUUGUCUGG | 6706 | CCAGACAAAGUAUUUAGAA |
| siRNA 3071 | 3071 | UCUAAAUACUUUGUCUGGA | 6707 | UCCAGACAAAGUAUUUAGA |
| siRNA 3072 | 3072 | CUAAAUACUUUGUCUGGAG | 6708 | CUCCAGACAAAGUAUUUAG |
| siRNA 3073 | 3073 | UAAAUACUUUGUCUGGAGC | 6709 | GCUCCAGACAAAGUAUUUA |
| siRNA 3074 | 3074 | AAAUACUUUGUCUGGAGCA | 6710 | UGCUCCAGACAAAGUAUUU |
| siRNA 3075 | 3075 | AAUACUUUGUCUGGAGCAC | 6711 | GUGCUCCAGACAAAGUAUU |
| siRNA 3076 | 3076 | AUACUUUGUCUGGAGCACA | 6712 | UGUGCUCCAGACAAAGUAU |
| siRNA 3077 | 3077 | UACUUUGUCUGGAGCACAA | 6713 | UUGUGCUCCAGACAAAGUA |
| siRNA 3078 | 3078 | ACUUUGUCUGGAGCACAAA | 6714 | UUUGUGCUCCAGACAAAGU |
| siRNA 3079 | 3079 | CUUUGUCUGGAGCACAAAA | 6715 | UUUUGUGCUCCAGACAAAG |
| siRNA 3080 | 3080 | UUUGUCUGGAGCACAAAAC | 6716 | GUUUUGUGCUCCAGACAAA |
| siRNA 3081 | 3081 | UUGUCUGGAGCACAAAACA | 6717 | UGUUUUGUGCUCCAGACAA |
| siRNA 3082 | 3082 | UGUCUGGAGCACAAAACAA | 6718 | UUGUUUUGUGCUCCAGACA |
| siRNA 3083 | 3083 | GUCUGGAGCACAAAACAAU | 6719 | AUUGUUUUGUGCUCCAGAC |
| siRNA 3084 | 3084 | UCUGGAGCACAAAACAAUA | 6720 | UAUUGUUUUGUGCUCCAGA |
| siRNA 3085 | 3085 | CUGGAGCACAAAACAAUAA | 6721 | UUAUUGUUUUGUGCUCCAG |
| siRNA 3086 | 3086 | UGGAGCACAAAACAAUAAA | 6722 | UUUAUUGUUUUGUGCUCCA |
| siRNA 3087 | 3087 | GGAGCACAAAACAAUAAAA | 6723 | UUUUAUUGUUUUGUGCUCC |
| siRNA 3088 | 3088 | GAGCACAAAACAAUAAAAG | 6724 | CUUUUAUUGUUUUGUGCUC |
| siRNA 3089 | 3089 | AGCACAAAACAAUAAAAGG | 6725 | CCUUUUAUUGUUUUGUGCU |
| siRNA 3090 | 3090 | GCACAAAACAAUAAAAGGU | 6726 | ACCUUUUAUUGUUUUGUGC |
| siRNA 3091 | 3091 | CACAAAACAAUAAAAGGUU | 6727 | AACCUUUUAUUGUUUUGUG |
| siRNA 3092 | 3092 | ACAAAACAAUAAAAGGUUA | 6728 | UAACCUUUUAUUGUUUUGU |
| siRNA 3093 | 3093 | CAAAACAAUAAAAGGUUAU | 6729 | AUAACCUUUUAUUGUUUUG |
| siRNA 3094 | 3094 | AAAACAAUAAAAGGUUAUC | 6730 | GAUAACCUUUUAUUGUUUU |
| siRNA 3095 | 3095 | AAACAAUAAAAGGUUAUCU | 6731 | AGAUAACCUUUUAUUGUUU |
| siRNA 3096 | 3096 | AACAAUAAAAGGUUAUCUU | 6732 | AAGAUAACCUUUUAUUGUU |
| siRNA 3097 | 3097 | ACAAUAAAAGGUUAUCUUA | 6733 | UAAGAUAACCUUUUAUUGU |
| siRNA 3098 | 3098 | CAAUAAAAGGUUAUCUUAU | 6734 | AUAAGAUAACCUUUUAUUG |
| siRNA 3099 | 3099 | AAUAAAAGGUUAUCUUAUA | 6735 | UAUAAGAUAACCUUUUAUU |
| siRNA 3100 | 3100 | AUAAAAGGUUAUCUUAUAG | 6736 | CUAUAAGAUAACCUUUUAU |
| siRNA 3101 | 3101 | UAAAAGGUUAUCUUAUAGU | 6737 | ACUAUAAGAUAACCUUUUA |
| siRNA 3102 | 3102 | AAAAGGUUAUCUUAUAGUC | 6738 | GACUAUAAGAUAACCUUUU |
| siRNA 3103 | 3103 | AAAGGUUAUCUUAUAGUCG | 6739 | CGACUAUAAGAUAACCUUU |
| siRNA 3104 | 3104 | AAGGUUAUCUUAUAGUCGU | 6740 | ACGACUAUAAGAUAACCUU |
| siRNA 3105 | 3105 | AGGUUAUCUUAUAGUCGUG | 6741 | CACGACUAUAAGAUAACCU |
| siRNA 3106 | 3106 | GGUUAUCUUAUAGUCGUGA | 6742 | UCACGACUAUAAGAUAACC |
| siRNA 3107 | 3107 | GUUAUCUUAUAGUCGUGAC | 6743 | GUCACGACUAUAAGAUAAC |
| siRNA 3108 | 3108 | UUAUCUUAUAGUCGUGACU | 6744 | AGUCACGACUAUAAGAUAA |
| siRNA 3109 | 3109 | UAUCUUAUAGUCGUGACUU | 6745 | AAGUCACGACUAUAAGAUA |
| siRNA 3110 | 3110 | AUCUUAUAGUCGUGACUUU | 6746 | AAAGUCACGACUAUAAGAU |
| siRNA 3111 | 3111 | UCUUAUAGUCGUGACUUUA | 6747 | UAAAGUCACGACUAUAAGA |
| siRNA 3112 | 3112 | CUUAUAGUCGUGACUUUAA | 6748 | UUAAAGUCACGACUAUAAG |
| siRNA 3113 | 3113 | UUAUAGUCGUGACUUUAAA | 6749 | UUUAAAGUCACGACUAUAA |
| siRNA 3114 | 3114 | UAUAGUCGUGACUUUAAAC | 6750 | GUUUAAAGUCACGACUAUA |
| siRNA 3115 | 3115 | AUAGUCGUGACUUUAAACU | 6751 | AGUUUAAAGUCACGACUAU |
| siRNA 3116 | 3116 | UAGUCGUGACUUUAAACUU | 6752 | AAGUUUAAAGUCACGACUA |
| siRNA 3117 | 3117 | AGUCGUGACUUUAAACUUU | 6753 | AAAGUUUAAAGUCACGACU |
| siRNA 3118 | 3118 | GUCGUGACUUUAAACUUUU | 6754 | AAAAGUUUAAAGUCACGAC |
| siRNA 3119 | 3119 | UCGUGACUUUAAACUUUUG | 6755 | CAAAAGUUUAAAGUCACGA |
| siRNA 3120 | 3120 | CGUGACUUUAAACUUUUGU | 6756 | ACAAAAGUUUAAAGUCACG |
| siRNA 3121 | 3121 | GUGACUUUAAACUUUUGUA | 6757 | UACAAAAGUUUAAAGUCAC |
| siRNA 3122 | 3122 | UGACUUUAAACUUUUGUAG | 6758 | CUACAAAAGUUUAAAGUCA |
| siRNA 3123 | 3123 | GACUUUAAACUUUUGUAGA | 6759 | UCUACAAAAGUUUAAAGUC |
| siRNA 3124 | 3124 | ACUUUAAACUUUUGUAGAC | 6760 | GUCUACAAAAGUUUAAAGU |
| siRNA 3125 | 3125 | CUUUAAACUUUUGUAGACC | 6761 | GGUCUACAAAAGUUUAAAG |
| siRNA 3126 | 3126 | UUUAAACUUUUGUAGACCA | 6762 | UGGUCUACAAAAGUUUAAA |
| siRNA 3127 | 3127 | UUAAACUUUUGUAGACCAC | 6763 | GUGGUCUACAAAAGUUUAA |
| siRNA 3128 | 3128 | UAAACUUUUGUAGACCACA | 6764 | UGUGGUCUACAAAAGUUUA |
| siRNA 3129 | 3129 | AAACUUUUGUAGACCACAA | 6765 | UUGUGGUCUACAAAAGUUU |
| siRNA 3130 | 3130 | AACUUUUGUAGACCACAAU | 6766 | AUUGUGGUCUACAAAAGUU |
| siRNA 3131 | 3131 | ACUUUUGUAGACCACAAUU | 6767 | AAUUGUGGUCUACAAAAGU |
| siRNA 3132 | 3132 | CUUUUGUAGACCACAAUUC | 6768 | GAAUUGUGGUCUACAAAAG |
| siRNA 3133 | 3133 | UUUUGUAGACCACAAUUCA | 6769 | UGAAUUGUGGUCUACAAAA |
| siRNA 3134 | 3134 | UUUGUAGACCACAAUUCAC | 6770 | GUGAAUUGUGGUCUACAAA |
| siRNA 3135 | 3135 | UUGUAGACCACAAUUCACU | 6771 | AGUGAAUUGUGGUCUACAA |
| siRNA 3136 | 3136 | UGUAGACCACAAUUCACUU | 6772 | AAGUGAAUUGUGGUCUACA |
| siRNA 3137 | 3137 | GUAGACCACAAUUCACUUU | 6773 | AAAGUGAAUUGUGGUCUAC |
| siRNA 3138 | 3138 | UAGACCACAAUUCACUUUU | 6774 | AAAAGUGAAUUGUGGUCUA |
| siRNA 3139 | 3139 | AGACCACAAUUCACUUUUU | 6775 | AAAAAGUGAAUUGUGGUCU |
| siRNA 3140 | 3140 | GACCACAAUUCACUUUUUA | 6776 | UAAAAAGUGAAUUGUGGUC |
| siRNA 3141 | 3141 | ACCACAAUUCACUUUUUAG | 6777 | CUAAAAAGUGAAUUGUGGU |
| siRNA 3142 | 3142 | CCACAAUUCACUUUUUAGU | 6778 | ACUAAAAAGUGAAUUGUGG |
| siRNA 3143 | 3143 | CACAAUUCACUUUUUAGUU | 6779 | AACUAAAAAGUGAAUUGUG |
| siRNA 3144 | 3144 | ACAAUUCACUUUUUAGUUU | 6780 | AAACUAAAAAGUGAAUUGU |
| siRNA 3145 | 3145 | CAAUUCACUUUUUAGUUUU | 6781 | AAAACUAAAAAGUGAAUUG |
| siRNA 3146 | 3146 | AAUUCACUUUUUAGUUUUC | 6782 | GAAAACUAAAAAGUGAAUU |
| siRNA 3147 | 3147 | AUUCACUUUUUAGUUUUCU | 6783 | AGAAAACUAAAAAGUGAAU |
| siRNA 3148 | 3148 | UUCACUUUUUAGUUUUCUU | 6784 | AAGAAAACUAAAAAGUGAA |
| siRNA 3149 | 3149 | UCACUUUUUAGUUUUCUUU | 6785 | AAAGAAAACUAAAAAGUGA |
| siRNA 3150 | 3150 | CACUUUUUAGUUUUCUUUU | 6786 | AAAAGAAAACUAAAAAGUG |
| siRNA 3151 | 3151 | ACUUUUUAGUUUUCUUUUA | 6787 | UAAAAGAAAACUAAAAAGU |
| siRNA 3152 | 3152 | CUUUUUAGUUUUCUUUUAC | 6788 | GUAAAAGAAAACUAAAAAG |
| siRNA 3153 | 3153 | UUUUUAGUUUUCUUUUACU | 6789 | AGUAAAAGAAAACUAAAAA |
| siRNA 3154 | 3154 | UUUUAGUUUUCUUUUACUU | 6790 | AAGUAAAAGAAAACUAAAA |
| siRNA 3155 | 3155 | UUUAGUUUUCUUUUACUUA | 6791 | UAAGUAAAAGAAAACUAAA |
| siRNA 3156 | 3156 | UUAGUUUUCUUUUACUUAA | 6792 | UUAAGUAAAAGAAAACUAA |
| siRNA 3157 | 3157 | UAGUUUUCUUUUACUUAAA | 6793 | UUUAAGUAAAAGAAAACUA |
| siRNA 3158 | 3158 | AGUUUUCUUUUACUUAAAU | 6794 | AUUUAAGUAAAAGAAAACU |
| siRNA 3159 | 3159 | GUUUUCUUUUACUUAAAUC | 6795 | GAUUUAAGUAAAAGAAAAC |
| siRNA 3160 | 3160 | UUUUCUUUUACUUAAAUCC | 6796 | GGAUUUAAGUAAAAGAAAA |
| siRNA 3161 | 3161 | UUUCUUUUACUUAAAUCCC | 6797 | GGGAUUUAAGUAAAAGAAA |
| siRNA 3162 | 3162 | UUCUUUUACUUAAAUCCCA | 6798 | UGGGAUUUAAGUAAAAGAA |
| siRNA 3163 | 3163 | UCUUUUACUUAAAUCCCAU | 6799 | AUGGGAUUUAAGUAAAAGA |
| siRNA 3164 | 3164 | CUUUUACUUAAAUCCCAUC | 6800 | GAUGGGAUUUAAGUAAAAG |
| siRNA 3165 | 3165 | UUUUACUUAAAUCCCAUCU | 6801 | AGAUGGGAUUUAAGUAAAA |
| siRNA 3166 | 3166 | UUUACUUAAAUCCCAUCUG | 6802 | CAGAUGGGAUUUAAGUAAA |
| siRNA 3167 | 3167 | UUACUUAAAUCCCAUCUGC | 6803 | GCAGAUGGGAUUUAAGUAA |
| siRNA 3168 | 3168 | UACUUAAAUCCCAUCUGCA | 6804 | UGCAGAUGGGAUUUAAGUA |
| siRNA 3169 | 3169 | ACUUAAAUCCCAUCUGCAG | 6805 | CUGCAGAUGGGAUUUAAGU |
| siRNA 3170 | 3170 | CUUAAAUCCCAUCUGCAGU | 6806 | ACUGCAGAUGGGAUUUAAG |
| siRNA 3171 | 3171 | UUAAAUCCCAUCUGCAGUC | 6807 | GACUGCAGAUGGGAUUUAA |
| siRNA 3172 | 3172 | UAAAUCCCAUCUGCAGUCU | 6808 | AGACUGCAGAUGGGAUUUA |
| siRNA 3173 | 3173 | AAAUCCCAUCUGCAGUCUC | 6809 | GAGACUGCAGAUGGGAUUU |
| siRNA 3174 | 3174 | AAUCCCAUCUGCAGUCUCA | 6810 | UGAGACUGCAGAUGGGAUU |
| siRNA 3175 | 3175 | AUCCCAUCUGCAGUCUCAA | 6811 | UUGAGACUGCAGAUGGGAU |
| siRNA 3176 | 3176 | UCCCAUCUGCAGUCUCAAA | 6812 | UUUGAGACUGCAGAUGGGA |
| siRNA 3177 | 3177 | CCCAUCUGCAGUCUCAAAU | 6813 | AUUUGAGACUGCAGAUGGG |
| siRNA 3178 | 3178 | CCAUCUGCAGUCUCAAAUU | 6814 | AAUUUGAGACUGCAGAUGG |
| siRNA 3179 | 3179 | CAUCUGCAGUCUCAAAUUU | 6815 | AAAUUUGAGACUGCAGAUG |
| siRNA 3180 | 3180 | AUCUGCAGUCUCAAAUUUA | 6816 | UAAAUUUGAGACUGCAGAU |
| siRNA 3181 | 3181 | UCUGCAGUCUCAAAUUUAA | 6817 | UUAAAUUUGAGACUGCAGA |
| siRNA 3182 | 3182 | CUGCAGUCUCAAAUUUAAG | 6818 | CUUAAAUUUGAGACUGCAG |
| siRNA 3183 | 3183 | UGCAGUCUCAAAUUUAAGU | 6819 | ACUUAAAUUUGAGACUGCA |
| siRNA 3184 | 3184 | GCAGUCUCAAAUUUAAGUU | 6820 | AACUUAAAUUUGAGACUGC |
| siRNA 3185 | 3185 | CAGUCUCAAAUUUAAGUUC | 6821 | GAACUUAAAUUUGAGACUG |
| siRNA 3186 | 3186 | AGUCUCAAAUUUAAGUUCU | 6822 | AGAACUUAAAUUUGAGACU |
| siRNA 3187 | 3187 | GUCUCAAAUUUAAGUUCUC | 6823 | GAGAACUUAAAUUUGAGAC |
| siRNA 3188 | 3188 | UCUCAAAUUUAAGUUCUCC | 6824 | GGAGAACUUAAAUUUGAGA |
| siRNA 3189 | 3189 | CUCAAAUUUAAGUUCUCCC | 6825 | GGGAGAACUUAAAUUUGAG |
| siRNA 3190 | 3190 | UCAAAUUUAAGUUCUCCCA | 6826 | UGGGAGAACUUAAAUUUGA |
| siRNA 3191 | 3191 | CAAAUUUAAGUUCUCCCAG | 6827 | CUGGGAGAACUUAAAUUUG |
| siRNA 3192 | 3192 | AAAUUUAAGUUCUCCCAGU | 6828 | ACUGGGAGAACUUAAAUUU |
| siRNA 3193 | 3193 | AAUUUAAGUUCUCCCAGUA | 6829 | UACUGGGAGAACUUAAAUU |
| siRNA 3194 | 3194 | AUUUAAGUUCUCCCAGUAG | 6830 | CUACUGGGAGAACUUAAAU |
| siRNA 3195 | 3195 | UUUAAGUUCUCCCAGUAGA | 6831 | UCUACUGGGAGAACUUAAA |
| siRNA 3196 | 3196 | UUAAGUUCUCCCAGUAGAG | 6832 | CUCUACUGGGAGAACUUAA |
| siRNA 3197 | 3197 | UAAGUUCUCCCAGUAGAGA | 6833 | UCUCUACUGGGAGAACUUA |
| siRNA 3198 | 3198 | AAGUUCUCCCAGUAGAGAU | 6834 | AUCUCUACUGGGAGAACUU |
| siRNA 3199 | 3199 | AGUUCUCCCAGUAGAGAUU | 6835 | AAUCUCUACUGGGAGAACU |
| siRNA 3200 | 3200 | GUUCUCCCAGUAGAGAUUG | 6836 | CAAUCUCUACUGGGAGAAC |
| siRNA 3201 | 3201 | UUCUCCCAGUAGAGAUUGA | 6837 | UCAAUCUCUACUGGGAGAA |
| siRNA 3202 | 3202 | UCUCCCAGUAGAGAUUGAG | 6838 | CUCAAUCUCUACUGGGAGA |
| siRNA 3203 | 3203 | CUCCCAGUAGAGAUUGAGU | 6839 | ACUCAAUCUCUACUGGGAG |
| siRNA 3204 | 3204 | UCCCAGUAGAGAUUGAGUU | 6840 | AACUCAAUCUCUACUGGGA |
| siRNA 3205 | 3205 | CCCAGUAGAGAUUGAGUUU | 6841 | AAACUCAAUCUCUACUGGG |
| siRNA 3206 | 3206 | CCAGUAGAGAUUGAGUUUG | 6842 | CAAACUCAAUCUCUACUGG |
| siRNA 3207 | 3207 | CAGUAGAGAUUGAGUUUGA | 6843 | UCAAACUCAAUCUCUACUG |
| siRNA 3208 | 3208 | AGUAGAGAUUGAGUUUGAG | 6844 | CUCAAACUCAAUCUCUACU |
| siRNA 3209 | 3209 | GUAGAGAUUGAGUUUGAGC | 6845 | GCUCAAACUCAAUCUCUAC |
| siRNA 3210 | 3210 | UAGAGAUUGAGUUUGAGCC | 6846 | GGCUCAAACUCAAUCUCUA |
| siRNA 3211 | 3211 | AGAGAUUGAGUUUGAGCCU | 6847 | AGGCUCAAACUCAAUCUCU |
| siRNA 3212 | 3212 | GAGAUUGAGUUUGAGCCUG | 6848 | CAGGCUCAAACUCAAUCUC |
| siRNA 3213 | 3213 | AGAUUGAGUUUGAGCCUGU | 6849 | ACAGGCUCAAACUCAAUCU |
| siRNA 3214 | 3214 | GAUUGAGUUUGAGCCUGUA | 6850 | UACAGGCUCAAACUCAAUC |
| siRNA 3215 | 3215 | AUUGAGUUUGAGCCUGUAU | 6851 | AUACAGGCUCAAACUCAAU |
| siRNA 3216 | 3216 | UUGAGUUUGAGCCUGUAUA | 6852 | UAUACAGGCUCAAACUCAA |
| siRNA 3217 | 3217 | UGAGUUUGAGCCUGUAUAU | 6853 | AUAUACAGGCUCAAACUCA |
| siRNA 3218 | 3218 | GAGUUUGAGCCUGUAUAUC | 6854 | GAUAUACAGGCUCAAACUC |
| siRNA 3219 | 3219 | AGUUUGAGCCUGUAUAUCU | 6855 | AGAUAUACAGGCUCAAACU |
| siRNA 3220 | 3220 | GUUUGAGCCUGUAUAUCUA | 6856 | UAGAUAUACAGGCUCAAAC |
| siRNA 3221 | 3221 | UUUGAGCCUGUAUAUCUAU | 6857 | AUAGAUAUACAGGCUCAAA |
| siRNA 3222 | 3222 | UUGAGCCUGUAUAUCUAUU | 6858 | AAUAGAUAUACAGGCUCAA |
| siRNA 3223 | 3223 | UGAGCCUGUAUAUCUAUUA | 6859 | UAAUAGAUAUACAGGCUCA |
| siRNA 3224 | 3224 | GAGCCUGUAUAUCUAUUAA | 6860 | UUAAUAGAUAUACAGGCUC |
| siRNA 3225 | 3225 | AGCCUGUAUAUCUAUUAAA | 6861 | UUUAAUAGAUAUACAGGCU |
| siRNA 3226 | 3226 | GCCUGUAUAUCUAUUAAAA | 6862 | UUUUAAUAGAUAUACAGGC |
| siRNA 3227 | 3227 | CCUGUAUAUCUAUUAAAAA | 6863 | UUUUUAAUAGAUAUACAGG |
| siRNA 3228 | 3228 | CUGUAUAUCUAUUAAAAAU | 6864 | AUUUUUAAUAGAUAUACAG |
| siRNA 3229 | 3229 | UGUAUAUCUAUUAAAAAUU | 6865 | AAUUUUUAAUAGAUAUACA |
| siRNA 3230 | 3230 | GUAUAUCUAUUAAAAAUUU | 6866 | AAAUUUUUAAUAGAUAUAC |
| siRNA 3231 | 3231 | UAUAUCUAUUAAAAAUUUC | 6867 | GAAAUUUUUAAUAGAUAUA |
| siRNA 3232 | 3232 | AUAUCUAUUAAAAAUUUCA | 6868 | UGAAAUUUUUAAUAGAUAU |
| siRNA 3233 | 3233 | UAUCUAUUAAAAAUUUCAA | 6869 | UUGAAAUUUUUAAUAGAUA |
| siRNA 3234 | 3234 | AUCUAUUAAAAAUUUCAAC | 6870 | GUUGAAAUUUUUAAUAGAU |
| siRNA 3235 | 3235 | UCUAUUAAAAAUUUCAACU | 6871 | AGUUGAAAUUUUUAAUAGA |
| siRNA 3236 | 3236 | CUAUUAAAAAUUUCAACUU | 6872 | AAGUUGAAAUUUUUAAUAG |
| siRNA 3237 | 3237 | UAUUAAAAAUUUCAACUUC | 6873 | GAAGUUGAAAUUUUUAAUA |
| siRNA 3238 | 3238 | AUUAAAAAUUUCAACUUCC | 6874 | GGAAGUUGAAAUUUUUAAU |
| siRNA 3239 | 3239 | UUAAAAAUUUCAACUUCCC | 6875 | GGGAAGUUGAAAUUUUUAA |
| siRNA 3240 | 3240 | UAAAAAUUUCAACUUCCCA | 6876 | UGGGAAGUUGAAAUUUUUA |
| siRNA 3241 | 3241 | AAAAAUUUCAACUUCCCAC | 6877 | GUGGGAAGUUGAAAUUUUU |
| siRNA 3242 | 3242 | AAAAUUUCAACUUCCCACA | 6878 | UGUGGGAAGUUGAAAUUUU |
| siRNA 3243 | 3243 | AAAUUUCAACUUCCCACAU | 6879 | AUGUGGGAAGUUGAAAUUU |
| siRNA 3244 | 3244 | AAUUUCAACUUCCCACAUA | 6880 | UAUGUGGGAAGUUGAAAUU |
| siRNA 3245 | 3245 | AUUUCAACUUCCCACAUAU | 6881 | AUAUGUGGGAAGUUGAAAU |
| siRNA 3246 | 3246 | UUUCAACUUCCCACAUAUA | 6882 | UAUAUGUGGGAAGUUGAAA |
| siRNA 3247 | 3247 | UUCAACUUCCCACAUAUAU | 6883 | AUAUAUGUGGGAAGUUGAA |
| siRNA 3248 | 3248 | UCAACUUCCCACAUAUAUU | 6884 | AAUAUAUGUGGGAAGUUGA |
| siRNA 3249 | 3249 | CAACUUCCCACAUAUAUUU | 6885 | AAAUAUAUGUGGGAAGUUG |
| siRNA 3250 | 3250 | AACUUCCCACAUAUAUUUA | 6886 | UAAAUAUAUGUGGGAAGUU |
| siRNA 3251 | 3251 | ACUUCCCACAUAUAUUUAC | 6887 | GUAAAUAUAUGUGGGAAGU |
| siRNA 3252 | 3252 | CUUCCCACAUAUAUUUACU | 6888 | AGUAAAUAUAUGUGGGAAG |
| siRNA 3253 | 3253 | UUCCCACAUAUAUUUACUA | 6889 | UAGUAAAUAUAUGUGGGAA |
| siRNA 3254 | 3254 | UCCCACAUAUAUUUACUAA | 6890 | UUAGUAAAUAUAUGUGGGA |
| siRNA 3255 | 3255 | CCCACAUAUAUUUACUAAG | 6891 | CUUAGUAAAUAUAUGUGGG |
| siRNA 3256 | 3256 | CCACAUAUAUUUACUAAGA | 6892 | UCUUAGUAAAUAUAUGUGG |
| siRNA 3257 | 3257 | CACAUAUAUUUACUAAGAU | 6893 | AUCUUAGUAAAUAUAUGUG |
| siRNA 3258 | 3258 | ACAUAUAUUUACUAAGAUG | 6894 | CAUCUUAGUAAAUAUAUGU |
| siRNA 3259 | 3259 | CAUAUAUUUACUAAGAUGA | 6895 | UCAUCUUAGUAAAUAUAUG |
| siRNA 3260 | 3260 | AUAUAUUUACUAAGAUGAU | 6896 | AUCAUCUUAGUAAAUAUAU |
| siRNA 3261 | 3261 | UAUAUUUACUAAGAUGAUU | 6897 | AAUCAUCUUAGUAAAUAUA |
| siRNA 3262 | 3262 | AUAUUUACUAAGAUGAUUA | 6898 | UAAUCAUCUUAGUAAAUAU |
| siRNA 3263 | 3263 | UAUUUACUAAGAUGAUUAA | 6899 | UUAAUCAUCUUAGUAAAUA |
| siRNA 3264 | 3264 | AUUUACUAAGAUGAUUAAG | 6900 | CUUAAUCAUCUUAGUAAAU |
| siRNA 3265 | 3265 | UUUACUAAGAUGAUUAAGA | 6901 | UCUUAAUCAUCUUAGUAAA |
| siRNA 3266 | 3266 | UUACUAAGAUGAUUAAGAC | 6902 | GUCUUAAUCAUCUUAGUAA |
| siRNA 3267 | 3267 | UACUAAGAUGAUUAAGACU | 6903 | AGUCUUAAUCAUCUUAGUA |
| siRNA 3268 | 3268 | ACUAAGAUGAUUAAGACUU | 6904 | AAGUCUUAAUCAUCUUAGU |
| siRNA 3269 | 3269 | CUAAGAUGAUUAAGACUUA | 6905 | UAAGUCUUAAUCAUCUUAG |
| siRNA 3270 | 3270 | UAAGAUGAUUAAGACUUAC | 6906 | GUAAGUCUUAAUCAUCUUA |
| siRNA 3271 | 3271 | AAGAUGAUUAAGACUUACA | 6907 | UGUAAGUCUUAAUCAUCUU |
| siRNA 3272 | 3272 | AGAUGAUUAAGACUUACAU | 6908 | AUGUAAGUCUUAAUCAUCU |
| siRNA 3273 | 3273 | GAUGAUUAAGACUUACAUU | 6909 | AAUGUAAGUCUUAAUCAUC |
| siRNA 3274 | 3274 | AUGAUUAAGACUUACAUUU | 6910 | AAAUGUAAGUCUUAAUCAU |
| siRNA 3275 | 3275 | UGAUUAAGACUUACAUUUU | 6911 | AAAAUGUAAGUCUUAAUCA |
| siRNA 3276 | 3276 | GAUUAAGACUUACAUUUUC | 6912 | GAAAAUGUAAGUCUUAAUC |
| siRNA 3277 | 3277 | AUUAAGACUUACAUUUUCU | 6913 | AGAAAAUGUAAGUCUUAAU |
| siRNA 3278 | 3278 | UUAAGACUUACAUUUUCUG | 6914 | CAGAAAAUGUAAGUCUUAA |
| siRNA 3279 | 3279 | UAAGACUUACAUUUUCUGC | 6915 | GCAGAAAAUGUAAGUCUUA |
| siRNA 3280 | 3280 | AAGACUUACAUUUUCUGCA | 6916 | UGCAGAAAAUGUAAGUCUU |
| siRNA 3281 | 3281 | AGACUUACAUUUUCUGCAC | 6917 | GUGCAGAAAAUGUAAGUCU |
| siRNA 3282 | 3282 | GACUUACAUUUUCUGCACA | 6918 | UGUGCAGAAAAUGUAAGUC |
| siRNA 3283 | 3283 | ACUUACAUUUUCUGCACAG | 6919 | CUGUGCAGAAAAUGUAAGU |
| siRNA 3284 | 3284 | CUUACAUUUUCUGCACAGG | 6920 | CCUGUGCAGAAAAUGUAAG |
| siRNA 3285 | 3285 | UUACAUUUUCUGCACAGGU | 6921 | ACCUGUGCAGAAAAUGUAA |
| siRNA 3286 | 3286 | UACAUUUUCUGCACAGGUC | 6922 | GACCUGUGCAGAAAAUGUA |
| siRNA 3287 | 3287 | ACAUUUUCUGCACAGGUCU | 6923 | AGACCUGUGCAGAAAAUGU |
| siRNA 3288 | 3288 | CAUUUUCUGCACAGGUCUG | 6924 | CAGACCUGUGCAGAAAAUG |
| siRNA 3289 | 3289 | AUUUUCUGCACAGGUCUGC | 6925 | GCAGACCUGUGCAGAAAAU |
| siRNA 3290 | 3290 | UUUUCUGCACAGGUCUGCA | 6926 | UGCAGACCUGUGCAGAAAA |
| siRNA 3291 | 3291 | UUUCUGCACAGGUCUGCAA | 6927 | UUGCAGACCUGUGCAGAAA |
| siRNA 3292 | 3292 | UUCUGCACAGGUCUGCAAA | 6928 | UUUGCAGACCUGUGCAGAA |
| siRNA 3293 | 3293 | UCUGCACAGGUCUGCAAAA | 6929 | UUUUGCAGACCUGUGCAGA |
| siRNA 3294 | 3294 | CUGCACAGGUCUGCAAAAA | 6930 | UUUUUGCAGACCUGUGCAG |
| siRNA 3295 | 3295 | UGCACAGGUCUGCAAAAAC | 6931 | GUUUUUGCAGACCUGUGCA |
| siRNA 3296 | 3296 | GCACAGGUCUGCAAAAACA | 6932 | UGUUUUUGCAGACCUGUGC |
| siRNA 3297 | 3297 | CACAGGUCUGCAAAAACAA | 6933 | UUGUUUUUGCAGACCUGUG |
| siRNA 3298 | 3298 | ACAGGUCUGCAAAAACAAA | 6934 | UUUGUUUUUGCAGACCUGU |
| siRNA 3299 | 3299 | CAGGUCUGCAAAAACAAAA | 6935 | UUUUGUUUUUGCAGACCUG |
| siRNA 3300 | 3300 | AGGUCUGCAAAAACAAAAA | 6936 | UUUUUGUUUUUGCAGACCU |
| siRNA 3301 | 3301 | GGUCUGCAAAAACAAAAAU | 6937 | AUUUUUGUUUUUGCAGACC |
| siRNA 3302 | 3302 | GUCUGCAAAAACAAAAAUU | 6938 | AAUUUUUGUUUUUGCAGAC |
| siRNA 3303 | 3303 | UCUGCAAAAACAAAAAUUA | 6939 | UAAUUUUUGUUUUUGCAGA |
| siRNA 3304 | 3304 | CUGCAAAAACAAAAAUUAU | 6940 | AUAAUUUUUGUUUUUGCAG |
| siRNA 3305 | 3305 | UGCAAAAACAAAAAUUAUA | 6941 | UAUAAUUUUUGUUUUUGCA |
| siRNA 3306 | 3306 | GCAAAAACAAAAAUUAUAA | 6942 | UUAUAAUUUUUGUUUUUGC |
| siRNA 3307 | 3307 | CAAAAACAAAAAUUAUAAA | 6943 | UUUAUAAUUUUUGUUUUUG |
| siRNA 3308 | 3308 | AAAAACAAAAAUUAUAAAC | 6944 | GUUUAUAAUUUUUGUUUUU |
| siRNA 3309 | 3309 | AAAACAAAAAUUAUAAACU | 6945 | AGUUUAUAAUUUUUGUUUU |
| siRNA 3310 | 3310 | AAACAAAAAUUAUAAACUA | 6946 | UAGUUUAUAAUUUUUGUUU |
| siRNA 3311 | 3311 | AACAAAAAUUAUAAACUAG | 6947 | CUAGUUUAUAAUUUUUGUU |
| siRNA 3312 | 3312 | ACAAAAAUUAUAAACUAGU | 6948 | ACUAGUUUAUAAUUUUUGU |
| siRNA 3313 | 3313 | CAAAAAUUAUAAACUAGUC | 6949 | GACUAGUUUAUAAUUUUUG |
| siRNA 3314 | 3314 | AAAAAUUAUAAACUAGUCC | 6950 | GGACUAGUUUAUAAUUUUU |
| siRNA 3315 | 3315 | AAAAUUAUAAACUAGUCCA | 6951 | UGGACUAGUUUAUAAUUUU |
| siRNA 3316 | 3316 | AAAUUAUAAACUAGUCCAU | 6952 | AUGGACUAGUUUAUAAUUU |
| siRNA 3317 | 3317 | AAUUAUAAACUAGUCCAUC | 6953 | GAUGGACUAGUUUAUAAUU |
| siRNA 3318 | 3318 | AUUAUAAACUAGUCCAUCC | 6954 | GGAUGGACUAGUUUAUAAU |
| siRNA 3319 | 3319 | UUAUAAACUAGUCCAUCCA | 6955 | UGGAUGGACUAGUUUAUAA |
| siRNA 3320 | 3320 | UAUAAACUAGUCCAUCCAA | 6956 | UUGGAUGGACUAGUUUAUA |
| siRNA 3321 | 3321 | AUAAACUAGUCCAUCCAAG | 6957 | CUUGGAUGGACUAGUUUAU |
| siRNA 3322 | 3322 | UAAACUAGUCCAUCCAAGA | 6958 | UCUUGGAUGGACUAGUUUA |
| siRNA 3323 | 3323 | AAACUAGUCCAUCCAAGAA | 6959 | UUCUUGGAUGGACUAGUUU |
| siRNA 3324 | 3324 | AACUAGUCCAUCCAAGAAC | 6960 | GUUCUUGGAUGGACUAGUU |
| siRNA 3325 | 3325 | ACUAGUCCAUCCAAGAACC | 6961 | GGUUCUUGGAUGGACUAGU |
| siRNA 3326 | 3326 | CUAGUCCAUCCAAGAACCA | 6962 | UGGUUCUUGGAUGGACUAG |
| siRNA 3327 | 3327 | UAGUCCAUCCAAGAACCAA | 6963 | UUGGUUCUUGGAUGGACUA |
| siRNA 3328 | 3328 | AGUCCAUCCAAGAACCAAA | 6964 | UUUGGUUCUUGGAUGGACU |
| siRNA 3329 | 3329 | GUCCAUCCAAGAACCAAAG | 6965 | CUUUGGUUCUUGGAUGGAC |
| siRNA 3330 | 3330 | UCCAUCCAAGAACCAAAGU | 6966 | ACUUUGGUUCUUGGAUGGA |
| siRNA 3331 | 3331 | CCAUCCAAGAACCAAAGUU | 6967 | AACUUUGGUUCUUGGAUGG |
| siRNA 3332 | 3332 | CAUCCAAGAACCAAAGUUU | 6968 | AAACUUUGGUUCUUGGAUG |
| siRNA 3333 | 3333 | AUCCAAGAACCAAAGUUUG | 6969 | CAAACUUUGGUUCUUGGAU |
| siRNA 3334 | 3334 | UCCAAGAACCAAAGUUUGU | 6970 | ACAAACUUUGGUUCUUGGA |
| siRNA 3335 | 3335 | CCAAGAACCAAAGUUUGUA | 6971 | UACAAACUUUGGUUCUUGG |
| siRNA 3336 | 3336 | CAAGAACCAAAGUUUGUAU | 6972 | AUACAAACUUUGGUUCUUG |
| siRNA 3337 | 3337 | AAGAACCAAAGUUUGUAUA | 6973 | UAUACAAACUUUGGUUCUU |
| siRNA 3338 | 3338 | AGAACCAAAGUUUGUAUAA | 6974 | UUAUACAAACUUUGGUUCU |
| siRNA 3339 | 3339 | GAACCAAAGUUUGUAUAAA | 6975 | UUUAUACAAACUUUGGUUC |
| siRNA 3340 | 3340 | AACCAAAGUUUGUAUAAAC | 6976 | GUUUAUACAAACUUUGGUU |
| siRNA 3341 | 3341 | ACCAAAGUUUGUAUAAACA | 6977 | UGUUUAUACAAACUUUGGU |
| siRNA 3342 | 3342 | CCAAAGUUUGUAUAAACAG | 6978 | CUGUUUAUACAAACUUUGG |
| siRNA 3343 | 3343 | CAAAGUUUGUAUAAACAGG | 6979 | CCUGUUUAUACAAACUUUG |
| siRNA 3344 | 3344 | AAAGUUUGUAUAAACAGGU | 6980 | ACCUGUUUAUACAAACUUU |
| siRNA 3345 | 3345 | AAGUUUGUAUAAACAGGUU | 6981 | AACCUGUUUAUACAAACUU |
| siRNA 3346 | 3346 | AGUUUGUAUAAACAGGUUG | 6982 | CAACCUGUUUAUACAAACU |
| siRNA 3347 | 3347 | GUUUGUAUAAACAGGUUGC | 6983 | GCAACCUGUUUAUACAAAC |
| siRNA 3348 | 3348 | UUUGUAUAAACAGGUUGCU | 6984 | AGCAACCUGUUUAUACAAA |
| siRNA 3349 | 3349 | UUGUAUAAACAGGUUGCUA | 6985 | UAGCAACCUGUUUAUACAA |
| siRNA 3350 | 3350 | UGUAUAAACAGGUUGCUAU | 6986 | AUAGCAACCUGUUUAUACA |
| siRNA 3351 | 3351 | GUAUAAACAGGUUGCUAUA | 6987 | UAUAGCAACCUGUUUAUAC |
| siRNA 3352 | 3352 | UAUAAACAGGUUGCUAUAA | 6988 | UUAUAGCAACCUGUUUAUA |
| siRNA 3353 | 3353 | AUAAACAGGUUGCUAUAAG | 6989 | CUUAUAGCAACCUGUUUAU |
| siRNA 3354 | 3354 | UAAACAGGUUGCUAUAAGC | 6990 | GCUUAUAGCAACCUGUUUA |
| siRNA 3355 | 3355 | AAACAGGUUGCUAUAAGCU | 6991 | AGCUUAUAGCAACCUGUUU |
| siRNA 3356 | 3356 | AACAGGUUGCUAUAAGCUU | 6992 | AAGCUUAUAGCAACCUGUU |
| siRNA 3357 | 3357 | ACAGGUUGCUAUAAGCUUG | 6993 | CAAGCUUAUAGCAACCUGU |
| siRNA 3358 | 3358 | CAGGUUGCUAUAAGCUUGG | 6994 | CCAAGCUUAUAGCAACCUG |
| siRNA 3359 | 3359 | AGGUUGCUAUAAGCUUGGU | 6995 | ACCAAGCUUAUAGCAACCU |
| siRNA 3360 | 3360 | GGUUGCUAUAAGCUUGGUG | 6996 | CACCAAGCUUAUAGCAACC |
| siRNA 3361 | 3361 | GUUGCUAUAAGCUUGGUGA | 6997 | UCACCAAGCUUAUAGCAAC |
| siRNA 3362 | 3362 | UUGCUAUAAGCUUGGUGAA | 6998 | UUCACCAAGCUUAUAGCAA |
| siRNA 3363 | 3363 | UGCUAUAAGCUUGGUGAAA | 6999 | UUUCACCAAGCUUAUAGCA |
| siRNA 3364 | 3364 | GCUAUAAGCUUGGUGAAAU | 7000 | AUUUCACCAAGCUUAUAGC |
| siRNA 3365 | 3365 | CUAUAAGCUUGGUGAAAUG | 7001 | CAUUUCACCAAGCUUAUAG |
| siRNA 3366 | 3366 | UAUAAGCUUGGUGAAAUGA | 7002 | UCAUUUCACCAAGCUUAUA |
| siRNA 3367 | 3367 | AUAAGCUUGGUGAAAUGAA | 7003 | UUCAUUUCACCAAGCUUAU |
| siRNA 3368 | 3368 | UAAGCUUGGUGAAAUGAAA | 7004 | UUUCAUUUCACCAAGCUUA |
| siRNA 3369 | 3369 | AAGCUUGGUGAAAUGAAAA | 7005 | UUUUCAUUUCACCAAGCUU |
| siRNA 3370 | 3370 | AGCUUGGUGAAAUGAAAAU | 7006 | AUUUUCAUUUCACCAAGCU |
| siRNA 3371 | 3371 | GCUUGGUGAAAUGAAAAUG | 7007 | CAUUUUCAUUUCACCAAGC |
| siRNA 3372 | 3372 | CUUGGUGAAAUGAAAAUGG | 7008 | CCAUUUUCAUUUCACCAAG |
| siRNA 3373 | 3373 | UUGGUGAAAUGAAAAUGGA | 7009 | UCCAUUUUCAUUUCACCAA |
| siRNA 3374 | 3374 | UGGUGAAAUGAAAAUGGAA | 7010 | UUCCAUUUUCAUUUCACCA |
| siRNA 3375 | 3375 | GGUGAAAUGAAAAUGGAAC | 7011 | GUUCCAUUUUCAUUUCACC |
| siRNA 3376 | 3376 | GUGAAAUGAAAAUGGAACA | 7012 | UGUUCCAUUUUCAUUUCAC |
| siRNA 3377 | 3377 | UGAAAUGAAAAUGGAACAU | 7013 | AUGUUCCAUUUUCAUUUCA |
| siRNA 3378 | 3378 | GAAAUGAAAAUGGAACAUU | 7014 | AAUGUUCCAUUUUCAUUUC |
| siRNA 3379 | 3379 | AAAUGAAAAUGGAACAUUU | 7015 | AAAUGUUCCAUUUUCAUUU |
| siRNA 3380 | 3380 | AAUGAAAAUGGAACAUUUC | 7016 | GAAAUGUUCCAUUUUCAUU |
| siRNA 3381 | 3381 | AUGAAAAUGGAACAUUUCA | 7017 | UGAAAUGUUCCAUUUUCAU |
| siRNA 3382 | 3382 | UGAAAAUGGAACAUUUCAA | 7018 | UUGAAAUGUUCCAUUUUCA |
| siRNA 3383 | 3383 | GAAAAUGGAACAUUUCAAU | 7019 | AUUGAAAUGUUCCAUUUUC |
| siRNA 3384 | 3384 | AAAAUGGAACAUUUCAAUC | 7020 | GAUUGAAAUGUUCCAUUUU |
| siRNA 3385 | 3385 | AAAUGGAACAUUUCAAUCA | 7021 | UGAUUGAAAUGUUCCAUUU |
| siRNA 3386 | 3386 | AAUGGAACAUUUCAAUCAA | 7022 | UUGAUUGAAAUGUUCCAUU |
| siRNA 3387 | 3387 | AUGGAACAUUUCAAUCAAA | 7023 | UUUGAUUGAAAUGUUCCAU |
| siRNA 3388 | 3388 | UGGAACAUUUCAAUCAAAC | 7024 | GUUUGAUUGAAAUGUUCCA |
| siRNA 3389 | 3389 | GGAACAUUUCAAUCAAACA | 7025 | UGUUUGAUUGAAAUGUUCC |
| siRNA 3390 | 3390 | GAACAUUUCAAUCAAACAU | 7026 | AUGUUUGAUUGAAAUGUUC |
| siRNA 3391 | 3391 | AACAUUUCAAUCAAACAUU | 7027 | AAUGUUUGAUUGAAAUGUU |
| siRNA 3392 | 3392 | ACAUUUCAAUCAAACAUUU | 7028 | AAAUGUUUGAUUGAAAUGU |
| siRNA 3393 | 3393 | CAUUUCAAUCAAACAUUUC | 7029 | GAAAUGUUUGAUUGAAAUG |
| siRNA 3394 | 3394 | AUUUCAAUCAAACAUUUCC | 7030 | GGAAAUGUUUGAUUGAAAU |
| siRNA 3395 | 3395 | UUUCAAUCAAACAUUUCCU | 7031 | AGGAAAUGUUUGAUUGAAA |
| siRNA 3396 | 3396 | UUCAAUCAAACAUUUCCUA | 7032 | UAGGAAAUGUUUGAUUGAA |
| siRNA 3397 | 3397 | UCAAUCAAACAUUUCCUAU | 7033 | AUAGGAAAUGUUUGAUUGA |
| siRNA 3398 | 3398 | CAAUCAAACAUUUCCUAUA | 7034 | UAUAGGAAAUGUUUGAUUG |
| siRNA 3399 | 3399 | AAUCAAACAUUUCCUAUAU | 7035 | AUAUAGGAAAUGUUUGAUU |
| siRNA 3400 | 3400 | AUCAAACAUUUCCUAUAUA | 7036 | UAUAUAGGAAAUGUUUGAU |
| siRNA 3401 | 3401 | UCAAACAUUUCCUAUAUAA | 7037 | UUAUAUAGGAAAUGUUUGA |
| siRNA 3402 | 3402 | CAAACAUUUCCUAUAUAAC | 7038 | GUUAUAUAGGAAAUGUUUG |
| siRNA 3403 | 3403 | AAACAUUUCCUAUAUAACA | 7039 | UGUUAUAUAGGAAAUGUUU |
| siRNA 3404 | 3404 | AACAUUUCCUAUAUAACAA | 7040 | UUGUUAUAUAGGAAAUGUU |
| siRNA 3405 | 3405 | ACAUUUCCUAUAUAACAAU | 7041 | AUUGUUAUAUAGGAAAUGU |
| siRNA 3406 | 3406 | CAUUUCCUAUAUAACAAUU | 7042 | AAUUGUUAUAUAGGAAAUG |
| siRNA 3407 | 3407 | AUUUCCUAUAUAACAAUUA | 7043 | UAAUUGUUAUAUAGGAAAU |
| siRNA 3408 | 3408 | UUUCCUAUAUAACAAUUAU | 7044 | AUAAUUGUUAUAUAGGAAA |
| siRNA 3409 | 3409 | UUCCUAUAUAACAAUUAUU | 7045 | AAUAAUUGUUAUAUAGGAA |
| siRNA 3410 | 3410 | UCCUAUAUAACAAUUAUUA | 7046 | UAAUAAUUGUUAUAUAGGA |
| siRNA 3411 | 3411 | CCUAUAUAACAAUUAUUAU | 7047 | AUAAUAAUUGUUAUAUAGG |
| siRNA 3412 | 3412 | CUAUAUAACAAUUAUUAUA | 7048 | UAUAAUAAUUGUUAUAUAG |
| siRNA 3413 | 3413 | UAUAUAACAAUUAUUAUAU | 7049 | AUAUAAUAAUUGUUAUAUA |
| siRNA 3414 | 3414 | AUAUAACAAUUAUUAUAUU | 7050 | AAUAUAAUAAUUGUUAUAU |
| siRNA 3415 | 3415 | UAUAACAAUUAUUAUAUUU | 7051 | AAAUAUAAUAAUUGUUAUA |
| siRNA 3416 | 3416 | AUAACAAUUAUUAUAUUUA | 7052 | UAAAUAUAAUAAUUGUUAU |
| siRNA 3417 | 3417 | UAACAAUUAUUAUAUUUAC | 7053 | GUAAAUAUAAUAAUUGUUA |
| siRNA 3418 | 3418 | AACAAUUAUUAUAUUUACA | 7054 | UGUAAAUAUAAUAAUUGUU |
| siRNA 3419 | 3419 | ACAAUUAUUAUAUUUACAA | 7055 | UUGUAAAUAUAAUAAUUGU |
| siRNA 3420 | 3420 | CAAUUAUUAUAUUUACAAU | 7056 | AUUGUAAAUAUAAUAAUUG |
| siRNA 3421 | 3421 | AAUUAUUAUAUUUACAAUU | 7057 | AAUUGUAAAUAUAAUAAUU |
| siRNA 3422 | 3422 | AUUAUUAUAUUUACAAUUU | 7058 | AAAUUGUAAAUAUAAUAAU |
| siRNA 3423 | 3423 | UUAUUAUAUUUACAAUUUG | 7059 | CAAAUUGUAAAUAUAAUAA |
| siRNA 3424 | 3424 | UAUUAUAUUUACAAUUUGG | 7060 | CCAAAUUGUAAAUAUAAUA |
| siRNA 3425 | 3425 | AUUAUAUUUACAAUUUGGU | 7061 | ACCAAAUUGUAAAUAUAAU |
| siRNA 3426 | 3426 | UUAUAUUUACAAUUUGGUU | 7062 | AACCAAAUUGUAAAUAUAA |
| siRNA 3427 | 3427 | UAUAUUUACAAUUUGGUUU | 7063 | AAACCAAAUUGUAAAUAUA |
| siRNA 3428 | 3428 | AUAUUUACAAUUUGGUUUC | 7064 | GAAACCAAAUUGUAAAUAU |
| siRNA 3429 | 3429 | UAUUUACAAUUUGGUUUCU | 7065 | AGAAACCAAAUUGUAAAUA |
| siRNA 3430 | 3430 | AUUUACAAUUUGGUUUCUG | 7066 | CAGAAACCAAAUUGUAAAU |
| siRNA 3431 | 3431 | UUUACAAUUUGGUUUCUGC | 7067 | GCAGAAACCAAAUUGUAAA |
| siRNA 3432 | 3432 | UUACAAUUUGGUUUCUGCA | 7068 | UGCAGAAACCAAAUUGUAA |
| siRNA 3433 | 3433 | UACAAUUUGGUUUCUGCAA | 7069 | UUGCAGAAACCAAAUUGUA |
| siRNA 3434 | 3434 | ACAAUUUGGUUUCUGCAAU | 7070 | AUUGCAGAAACCAAAUUGU |
| siRNA 3435 | 3435 | CAAUUUGGUUUCUGCAAUA | 7071 | UAUUGCAGAAACCAAAUUG |
| siRNA 3436 | 3436 | AAUUUGGUUUCUGCAAUAU | 7072 | AUAUUGCAGAAACCAAAUU |
| siRNA 3437 | 3437 | AUUUGGUUUCUGCAAUAUU | 7073 | AAUAUUGCAGAAACCAAAU |
| siRNA 3438 | 3438 | UUUGGUUUCUGCAAUAUUU | 7074 | AAAUAUUGCAGAAACCAAA |
| siRNA 3439 | 3439 | UUGGUUUCUGCAAUAUUUU | 7075 | AAAAUAUUGCAGAAACCAA |
| siRNA 3440 | 3440 | UGGUUUCUGCAAUAUUUUU | 7076 | AAAAAUAUUGCAGAAACCA |
| siRNA 3441 | 3441 | GGUUUCUGCAAUAUUUUUC | 7077 | GAAAAAUAUUGCAGAAACC |
| siRNA 3442 | 3442 | GUUUCUGCAAUAUUUUUCU | 7078 | AGAAAAAUAUUGCAGAAAC |
| siRNA 3443 | 3443 | UUUCUGCAAUAUUUUUCUU | 7079 | AAGAAAAAUAUUGCAGAAA |
| siRNA 3444 | 3444 | UUCUGCAAUAUUUUUCUUA | 7080 | UAAGAAAAAUAUUGCAGAA |
| siRNA 3445 | 3445 | UCUGCAAUAUUUUUCUUAU | 7081 | AUAAGAAAAAUAUUGCAGA |
| siRNA 3446 | 3446 | CUGCAAUAUUUUUCUUAUG | 7082 | CAUAAGAAAAAUAUUGCAG |
| siRNA 3447 | 3447 | UGCAAUAUUUUUCUUAUGU | 7083 | ACAUAAGAAAAAUAUUGCA |
| siRNA 3448 | 3448 | GCAAUAUUUUUCUUAUGUC | 7084 | GACAUAAGAAAAAUAUUGC |
| siRNA 3449 | 3449 | CAAUAUUUUUCUUAUGUCC | 7085 | GGACAUAAGAAAAAUAUUG |
| siRNA 3450 | 3450 | AAUAUUUUUCUUAUGUCCA | 7086 | UGGACAUAAGAAAAAUAUU |
| siRNA 3451 | 3451 | AUAUUUUUCUUAUGUCCAC | 7087 | GUGGACAUAAGAAAAAUAU |
| siRNA 3452 | 3452 | UAUUUUUCUUAUGUCCACC | 7088 | GGUGGACAUAAGAAAAAUA |
| siRNA 3453 | 3453 | AUUUUUCUUAUGUCCACCC | 7089 | GGGUGGACAUAAGAAAAAU |
| siRNA 3454 | 3454 | UUUUUCUUAUGUCCACCCU | 7090 | AGGGUGGACAUAAGAAAAA |
| siRNA 3455 | 3455 | UUUUCUUAUGUCCACCCUU | 7091 | AAGGGUGGACAUAAGAAAA |
| siRNA 3456 | 3456 | UUUCUUAUGUCCACCCUUU | 7092 | AAAGGGUGGACAUAAGAAA |
| siRNA 3457 | 3457 | UUCUUAUGUCCACCCUUUU | 7093 | AAAAGGGUGGACAUAAGAA |
| siRNA 3458 | 3458 | UCUUAUGUCCACCCUUUUA | 7094 | UAAAAGGGUGGACAUAAGA |
| siRNA 3459 | 3459 | CUUAUGUCCACCCUUUUAA | 7095 | UUAAAAGGGUGGACAUAAG |
| siRNA 3460 | 3460 | UUAUGUCCACCCUUUUAAA | 7096 | UUUAAAAGGGUGGACAUAA |
| siRNA 3461 | 3461 | UAUGUCCACCCUUUUAAAA | 7097 | UUUUAAAAGGGUGGACAUA |
| siRNA 3462 | 3462 | AUGUCCACCCUUUUAAAAA | 7098 | UUUUUAAAAGGGUGGACAU |
| siRNA 3463 | 3463 | UGUCCACCCUUUUAAAAAU | 7099 | AUUUUUAAAAGGGUGGACA |
| siRNA 3464 | 3464 | GUCCACCCUUUUAAAAAUU | 7100 | AAUUUUUAAAAGGGUGGAC |
| siRNA 3465 | 3465 | UCCACCCUUUUAAAAAUUA | 7101 | UAAUUUUUAAAAGGGUGGA |
| siRNA 3466 | 3466 | CCACCCUUUUAAAAAUUAU | 7102 | AUAAUUUUUAAAAGGGUGG |
| siRNA 3467 | 3467 | CACCCUUUUAAAAAUUAUU | 7103 | AAUAAUUUUUAAAAGGGUG |
| siRNA 3468 | 3468 | ACCCUUUUAAAAAUUAUUA | 7104 | UAAUAAUUUUUAAAAGGGU |
| siRNA 3469 | 3469 | CCCUUUUAAAAAUUAUUAU | 7105 | AUAAUAAUUUUUAAAAGGG |
| siRNA 3470 | 3470 | CCUUUUAAAAAUUAUUAUU | 7106 | AAUAAUAAUUUUUAAAAGG |
| siRNA 3471 | 3471 | CUUUUAAAAAUUAUUAUUU | 7107 | AAAUAAUAAUUUUUAAAAG |
| siRNA 3472 | 3472 | UUUUAAAAAUUAUUAUUUG | 7108 | CAAAUAAUAAUUUUUAAAA |
| siRNA 3473 | 3473 | UUUAAAAAUUAUUAUUUGA | 7109 | UCAAAUAAUAAUUUUUAAA |
| siRNA 3474 | 3474 | UUAAAAAUUAUUAUUUGAA | 7110 | UUCAAAUAAUAAUUUUUAA |
| siRNA 3475 | 3475 | UAAAAAUUAUUAUUUGAAG | 7111 | CUUCAAAUAAUAAUUUUUA |
| siRNA 3476 | 3476 | AAAAAUUAUUAUUUGAAGU | 7112 | ACUUCAAAUAAUAAUUUUU |
| siRNA 3477 | 3477 | AAAAUUAUUAUUUGAAGUA | 7113 | UACUUCAAAUAAUAAUUUU |
| siRNA 3478 | 3478 | AAAUUAUUAUUUGAAGUAA | 7114 | UUACUUCAAAUAAUAAUUU |
| siRNA 3479 | 3479 | AAUUAUUAUUUGAAGUAAU | 7115 | AUUACUUCAAAUAAUAAUU |
| siRNA 3480 | 3480 | AUUAUUAUUUGAAGUAAUU | 7116 | AAUUACUUCAAAUAAUAAU |
| siRNA 3481 | 3481 | UUAUUAUUUGAAGUAAUUU | 7117 | AAAUUACUUCAAAUAAUAA |
| siRNA 3482 | 3482 | UAUUAUUUGAAGUAAUUUA | 7118 | UAAAUUACUUCAAAUAAUA |
| siRNA 3483 | 3483 | AUUAUUUGAAGUAAUUUAU | 7119 | AUAAAUUACUUCAAAUAAU |
| siRNA 3484 | 3484 | UUAUUUGAAGUAAUUUAUU | 7120 | AAUAAAUUACUUCAAAUAA |
| siRNA 3485 | 3485 | UAUUUGAAGUAAUUUAUUU | 7121 | AAAUAAAUUACUUCAAAUA |
| siRNA 3486 | 3486 | AUUUGAAGUAAUUUAUUUA | 7122 | UAAAUAAAUUACUUCAAAU |
| siRNA 3487 | 3487 | UUUGAAGUAAUUUAUUUAC | 7123 | GUAAAUAAAUUACUUCAAA |
| siRNA 3488 | 3488 | UUGAAGUAAUUUAUUUACA | 7124 | UGUAAAUAAAUUACUUCAA |
| siRNA 3489 | 3489 | UGAAGUAAUUUAUUUACAG | 7125 | CUGUAAAUAAAUUACUUCA |
| siRNA 3490 | 3490 | GAAGUAAUUUAUUUACAGG | 7126 | CCUGUAAAUAAAUUACUUC |
| siRNA 3491 | 3491 | AAGUAAUUUAUUUACAGGA | 7127 | UCCUGUAAAUAAAUUACUU |
| siRNA 3492 | 3492 | AGUAAUUUAUUUACAGGAA | 7128 | UUCCUGUAAAUAAAUUACU |
| siRNA 3493 | 3493 | GUAAUUUAUUUACAGGAAA | 7129 | UUUCCUGUAAAUAAAUUAC |
| siRNA 3494 | 3494 | UAAUUUAUUUACAGGAAAU | 7130 | AUUUCCUGUAAAUAAAUUA |
| siRNA 3495 | 3495 | AAUUUAUUUACAGGAAAUG | 7131 | CAUUUCCUGUAAAUAAAUU |
| siRNA 3496 | 3496 | AUUUAUUUACAGGAAAUGU | 7132 | ACAUUUCCUGUAAAUAAAU |
| siRNA 3497 | 3497 | UUUAUUUACAGGAAAUGUU | 7133 | AACAUUUCCUGUAAAUAAA |
| siRNA 3498 | 3498 | UUAUUUACAGGAAAUGUUA | 7134 | UAACAUUUCCUGUAAAUAA |
| siRNA 3499 | 3499 | UAUUUACAGGAAAUGUUAA | 7135 | UUAACAUUUCCUGUAAAUA |
| siRNA 3500 | 3500 | AUUUACAGGAAAUGUUAAU | 7136 | AUUAACAUUUCCUGUAAAU |
| siRNA 3501 | 3501 | UUUACAGGAAAUGUUAAUG | 7137 | CAUUAACAUUUCCUGUAAA |
| siRNA 3502 | 3502 | UUACAGGAAAUGUUAAUGA | 7138 | UCAUUAACAUUUCCUGUAA |
| siRNA 3503 | 3503 | UACAGGAAAUGUUAAUGAG | 7139 | CUCAUUAACAUUUCCUGUA |
| siRNA 3504 | 3504 | ACAGGAAAUGUUAAUGAGA | 7140 | UCUCAUUAACAUUUCCUGU |
| siRNA 3505 | 3505 | CAGGAAAUGUUAAUGAGAU | 7141 | AUCUCAUUAACAUUUCCUG |
| siRNA 3506 | 3506 | AGGAAAUGUUAAUGAGAUG | 7142 | CAUCUCAUUAACAUUUCCU |
| siRNA 3507 | 3507 | GGAAAUGUUAAUGAGAUGU | 7143 | ACAUCUCAUUAACAUUUCC |
| siRNA 3508 | 3508 | GAAAUGUUAAUGAGAUGUA | 7144 | UACAUCUCAUUAACAUUUC |
| siRNA 3509 | 3509 | AAAUGUUAAUGAGAUGUAU | 7145 | AUACAUCUCAUUAACAUUU |
| siRNA 3510 | 3510 | AAUGUUAAUGAGAUGUAUU | 7146 | AAUACAUCUCAUUAACAUU |
| siRNA 3511 | 3511 | AUGUUAAUGAGAUGUAUUU | 7147 | AAAUACAUCUCAUUAACAU |
| siRNA 3512 | 3512 | UGUUAAUGAGAUGUAUUUU | 7148 | AAAAUACAUCUCAUUAACA |
| siRNA 3513 | 3513 | GUUAAUGAGAUGUAUUUUC | 7149 | GAAAAUACAUCUCAUUAAC |
| siRNA 3514 | 3514 | UUAAUGAGAUGUAUUUUCU | 7150 | AGAAAAUACAUCUCAUUAA |
| siRNA 3515 | 3515 | UAAUGAGAUGUAUUUUCUU | 7151 | AAGAAAAUACAUCUCAUUA |
| siRNA 3516 | 3516 | AAUGAGAUGUAUUUUCUUA | 7152 | UAAGAAAAUACAUCUCAUU |
| siRNA 3517 | 3517 | AUGAGAUGUAUUUUCUUAU | 7153 | AUAAGAAAAUACAUCUCAU |
| siRNA 3518 | 3518 | UGAGAUGUAUUUUCUUAUA | 7154 | UAUAAGAAAAUACAUCUCA |
| siRNA 3519 | 3519 | GAGAUGUAUUUUCUUAUAG | 7155 | CUAUAAGAAAAUACAUCUC |
| siRNA 3520 | 3520 | AGAUGUAUUUUCUUAUAGA | 7156 | UCUAUAAGAAAAUACAUCU |
| siRNA 3521 | 3521 | GAUGUAUUUUCUUAUAGAG | 7157 | CUCUAUAAGAAAAUACAUC |
| siRNA 3522 | 3522 | AUGUAUUUUCUUAUAGAGA | 7158 | UCUCUAUAAGAAAAUACAU |
| siRNA 3523 | 3523 | UGUAUUUUCUUAUAGAGAU | 7159 | AUCUCUAUAAGAAAAUACA |
| siRNA 3524 | 3524 | GUAUUUUCUUAUAGAGAUA | 7160 | UAUCUCUAUAAGAAAAUAC |
| siRNA 3525 | 3525 | UAUUUUCUUAUAGAGAUAU | 7161 | AUAUCUCUAUAAGAAAAUA |
| siRNA 3526 | 3526 | AUUUUCUUAUAGAGAUAUU | 7162 | AAUAUCUCUAUAAGAAAAU |
| siRNA 3527 | 3527 | UUUUCUUAUAGAGAUAUUU | 7163 | AAAUAUCUCUAUAAGAAAA |
| siRNA 3528 | 3528 | UUUCUUAUAGAGAUAUUUC | 7164 | GAAAUAUCUCUAUAAGAAA |
| siRNA 3529 | 3529 | UUCUUAUAGAGAUAUUUCU | 7165 | AGAAAUAUCUCUAUAAGAA |
| siRNA 3530 | 3530 | UCUUAUAGAGAUAUUUCUU | 7166 | AAGAAAUAUCUCUAUAAGA |
| siRNA 3531 | 3531 | CUUAUAGAGAUAUUUCUUA | 7167 | UAAGAAAUAUCUCUAUAAG |
| siRNA 3532 | 3532 | UUAUAGAGAUAUUUCUUAC | 7168 | GUAAGAAAUAUCUCUAUAA |
| siRNA 3533 | 3533 | UAUAGAGAUAUUUCUUACA | 7169 | UGUAAGAAAUAUCUCUAUA |
| siRNA 3534 | 3534 | AUAGAGAUAUUUCUUACAG | 7170 | CUGUAAGAAAUAUCUCUAU |
| siRNA 3535 | 3535 | UAGAGAUAUUUCUUACAGA | 7171 | UCUGUAAGAAAUAUCUCUA |
| siRNA 3536 | 3536 | AGAGAUAUUUCUUACAGAA | 7172 | UUCUGUAAGAAAUAUCUCU |
| siRNA 3537 | 3537 | GAGAUAUUUCUUACAGAAA | 7173 | UUUCUGUAAGAAAUAUCUC |
| siRNA 3538 | 3538 | AGAUAUUUCUUACAGAAAG | 7174 | CUUUCUGUAAGAAAUAUCU |
| siRNA 3539 | 3539 | GAUAUUUCUUACAGAAAGC | 7175 | GCUUUCUGUAAGAAAUAUC |
| siRNA 3540 | 3540 | AUAUUUCUUACAGAAAGCU | 7176 | AGCUUUCUGUAAGAAAUAU |
| siRNA 3541 | 3541 | UAUUUCUUACAGAAAGCUU | 7177 | AAGCUUUCUGUAAGAAAUA |
| siRNA 3542 | 3542 | AUUUCUUACAGAAAGCUUU | 7178 | AAAGCUUUCUGUAAGAAAU |
| siRNA 3543 | 3543 | UUUCUUACAGAAAGCUUUG | 7179 | CAAAGCUUUCUGUAAGAAA |
| siRNA 3544 | 3544 | UUCUUACAGAAAGCUUUGU | 7180 | ACAAAGCUUUCUGUAAGAA |
| siRNA 3545 | 3545 | UCUUACAGAAAGCUUUGUA | 7181 | UACAAAGCUUUCUGUAAGA |
| siRNA 3546 | 3546 | CUUACAGAAAGCUUUGUAG | 7182 | CUACAAAGCUUUCUGUAAG |
| siRNA 3547 | 3547 | UUACAGAAAGCUUUGUAGC | 7183 | GCUACAAAGCUUUCUGUAA |
| siRNA 3548 | 3548 | UACAGAAAGCUUUGUAGCA | 7184 | UGCUACAAAGCUUUCUGUA |
| siRNA 3549 | 3549 | ACAGAAAGCUUUGUAGCAG | 7185 | CUGCUACAAAGCUUUCUGU |
| siRNA 3550 | 3550 | CAGAAAGCUUUGUAGCAGA | 7186 | UCUGCUACAAAGCUUUCUG |
| siRNA 3551 | 3551 | AGAAAGCUUUGUAGCAGAA | 7187 | UUCUGCUACAAAGCUUUCU |
| siRNA 3552 | 3552 | GAAAGCUUUGUAGCAGAAU | 7188 | AUUCUGCUACAAAGCUUUC |
| siRNA 3553 | 3553 | AAAGCUUUGUAGCAGAAUA | 7189 | UAUUCUGCUACAAAGCUUU |
| siRNA 3554 | 3554 | AAGCUUUGUAGCAGAAUAU | 7190 | AUAUUCUGCUACAAAGCUU |
| siRNA 3555 | 3555 | AGCUUUGUAGCAGAAUAUA | 7191 | UAUAUUCUGCUACAAAGCU |
| siRNA 3556 | 3556 | GCUUUGUAGCAGAAUAUAU | 7192 | AUAUAUUCUGCUACAAAGC |
| siRNA 3557 | 3557 | CUUUGUAGCAGAAUAUAUU | 7193 | AAUAUAUUCUGCUACAAAG |
| siRNA 3558 | 3558 | UUUGUAGCAGAAUAUAUUU | 7194 | AAAUAUAUUCUGCUACAAA |
| siRNA 3559 | 3559 | UUGUAGCAGAAUAUAUUUG | 7195 | CAAAUAUAUUCUGCUACAA |
| siRNA 3560 | 3560 | UGUAGCAGAAUAUAUUUGC | 7196 | GCAAAUAUAUUCUGCUACA |
| siRNA 3561 | 3561 | GUAGCAGAAUAUAUUUGCA | 7197 | UGCAAAUAUAUUCUGCUAC |
| siRNA 3562 | 3562 | UAGCAGAAUAUAUUUGCAG | 7198 | CUGCAAAUAUAUUCUGCUA |
| siRNA 3563 | 3563 | AGCAGAAUAUAUUUGCAGC | 7199 | GCUGCAAAUAUAUUCUGCU |
| siRNA 3564 | 3564 | GCAGAAUAUAUUUGCAGCU | 7200 | AGCUGCAAAUAUAUUCUGC |
| siRNA 3565 | 3565 | CAGAAUAUAUUUGCAGCUA | 7201 | UAGCUGCAAAUAUAUUCUG |
| siRNA 3566 | 3566 | AGAAUAUAUUUGCAGCUAU | 7202 | AUAGCUGCAAAUAUAUUCU |
| siRNA 3567 | 3567 | GAAUAUAUUUGCAGCUAUU | 7203 | AAUAGCUGCAAAUAUAUUC |
| siRNA 3568 | 3568 | AAUAUAUUUGCAGCUAUUG | 7204 | CAAUAGCUGCAAAUAUAUU |
| siRNA 3569 | 3569 | AUAUAUUUGCAGCUAUUGA | 7205 | UCAAUAGCUGCAAAUAUAU |
| siRNA 3570 | 3570 | UAUAUUUGCAGCUAUUGAC | 7206 | GUCAAUAGCUGCAAAUAUA |
| siRNA 3571 | 3571 | AUAUUUGCAGCUAUUGACU | 7207 | AGUCAAUAGCUGCAAAUAU |
| siRNA 3572 | 3572 | UAUUUGCAGCUAUUGACUU | 7208 | AAGUCAAUAGCUGCAAAUA |
| siRNA 3573 | 3573 | AUUUGCAGCUAUUGACUUU | 7209 | AAAGUCAAUAGCUGCAAAU |
| siRNA 3574 | 3574 | UUUGCAGCUAUUGACUUUG | 7210 | CAAAGUCAAUAGCUGCAAA |
| siRNA 3575 | 3575 | UUGCAGCUAUUGACUUUGU | 7211 | ACAAAGUCAAUAGCUGCAA |
| siRNA 3576 | 3576 | UGCAGCUAUUGACUUUGUA | 7212 | UACAAAGUCAAUAGCUGCA |
| siRNA 3577 | 3577 | GCAGCUAUUGACUUUGUAA | 7213 | UUACAAAGUCAAUAGCUGC |
| siRNA 3578 | 3578 | CAGCUAUUGACUUUGUAAU | 7214 | AUUACAAAGUCAAUAGCUG |
| siRNA 3579 | 3579 | AGCUAUUGACUUUGUAAUU | 7215 | AAUUACAAAGUCAAUAGCU |
| siRNA 3580 | 3580 | GCUAUUGACUUUGUAAUUU | 7216 | AAAUUACAAAGUCAAUAGC |
| siRNA 3581 | 3581 | CUAUUGACUUUGUAAUUUA | 7217 | UAAAUUACAAAGUCAAUAG |
| siRNA 3582 | 3582 | UAUUGACUUUGUAAUUUAG | 7218 | CUAAAUUACAAAGUCAAUA |
| siRNA 3583 | 3583 | AUUGACUUUGUAAUUUAGG | 7219 | CCUAAAUUACAAAGUCAAU |
| siRNA 3584 | 3584 | UUGACUUUGUAAUUUAGGA | 7220 | UCCUAAAUUACAAAGUCAA |
| siRNA 3585 | 3585 | UGACUUUGUAAUUUAGGAA | 7221 | UUCCUAAAUUACAAAGUCA |
| siRNA 3586 | 3586 | GACUUUGUAAUUUAGGAAA | 7222 | UUUCCUAAAUUACAAAGUC |
| siRNA 3587 | 3587 | ACUUUGUAAUUUAGGAAAA | 7223 | UUUUCCUAAAUUACAAAGU |
| siRNA 3588 | 3588 | CUUUGUAAUUUAGGAAAAA | 7224 | UUUUUCCUAAAUUACAAAG |
| siRNA 3589 | 3589 | UUUGUAAUUUAGGAAAAAU | 7225 | AUUUUUCCUAAAUUACAAA |
| siRNA 3590 | 3590 | UUGUAAUUUAGGAAAAAUG | 7226 | CAUUUUUCCUAAAUUACAA |
| siRNA 3591 | 3591 | UGUAAUUUAGGAAAAAUGU | 7227 | ACAUUUUUCCUAAAUUACA |
| siRNA 3592 | 3592 | GUAAUUUAGGAAAAAUGUA | 7228 | UACAUUUUUCCUAAAUUAC |
| siRNA 3593 | 3593 | UAAUUUAGGAAAAAUGUAU | 7229 | AUACAUUUUUCCUAAAUUA |
| siRNA 3594 | 3594 | AAUUUAGGAAAAAUGUAUA | 7230 | UAUACAUUUUUCCUAAAUU |
| siRNA 3595 | 3595 | AUUUAGGAAAAAUGUAUAA | 7231 | UUAUACAUUUUUCCUAAAU |
| siRNA 3596 | 3596 | UUUAGGAAAAAUGUAUAAU | 7232 | AUUAUACAUUUUUCCUAAA |
| siRNA 3597 | 3597 | UUAGGAAAAAUGUAUAAUA | 7233 | UAUUAUACAUUUUUCCUAA |
| siRNA 3598 | 3598 | UAGGAAAAAUGUAUAAUAA | 7234 | UUAUUAUACAUUUUUCCUA |
| siRNA 3599 | 3599 | AGGAAAAAUGUAUAAUAAG | 7235 | CUUAUUAUACAUUUUUCCU |
| siRNA 3600 | 3600 | GGAAAAAUGUAUAAUAAGA | 7236 | UCUUAUUAUACAUUUUUCC |
| siRNA 3601 | 3601 | GAAAAAUGUAUAAUAAGAU | 7237 | AUCUUAUUAUACAUUUUUC |
| siRNA 3602 | 3602 | AAAAAUGUAUAAUAAGAUA | 7238 | UAUCUUAUUAUACAUUUUU |
| siRNA 3603 | 3603 | AAAAUGUAUAAUAAGAUAA | 7239 | UUAUCUUAUUAUACAUUUU |
| siRNA 3604 | 3604 | AAAUGUAUAAUAAGAUAAA | 7240 | UUUAUCUUAUUAUACAUUU |
| siRNA 3605 | 3605 | AAUGUAUAAUAAGAUAAAA | 7241 | UUUUAUCUUAUUAUACAUU |
| siRNA 3606 | 3606 | AUGUAUAAUAAGAUAAAAU | 7242 | AUUUUAUCUUAUUAUACAU |
| siRNA 3607 | 3607 | UGUAUAAUAAGAUAAAAUC | 7243 | GAUUUUAUCUUAUUAUACA |
| siRNA 3608 | 3608 | GUAUAAUAAGAUAAAAUCU | 7244 | AGAUUUUAUCUUAUUAUAC |
| siRNA 3609 | 3609 | UAUAAUAAGAUAAAAUCUA | 7245 | UAGAUUUUAUCUUAUUAUA |
| siRNA 3610 | 3610 | AUAAUAAGAUAAAAUCUAU | 7246 | AUAGAUUUUAUCUUAUUAU |
| siRNA 3611 | 3611 | UAAUAAGAUAAAAUCUAUU | 7247 | AAUAGAUUUUAUCUUAUUA |
| siRNA 3612 | 3612 | AAUAAGAUAAAAUCUAUUA | 7248 | UAAUAGAUUUUAUCUUAUU |
| siRNA 3613 | 3613 | AUAAGAUAAAAUCUAUUAA | 7249 | UUAAUAGAUUUUAUCUUAU |
| siRNA 3614 | 3614 | UAAGAUAAAAUCUAUUAAA | 7250 | UUUAAUAGAUUUUAUCUUA |
| siRNA 3615 | 3615 | AAGAUAAAAUCUAUUAAAU | 7251 | AUUUAAUAGAUUUUAUCUU |
| siRNA 3616 | 3616 | AGAUAAAAUCUAUUAAAUU | 7252 | AAUUUAAUAGAUUUUAUCU |
| siRNA 3617 | 3617 | GAUAAAAUCUAUUAAAUUU | 7253 | AAAUUUAAUAGAUUUUAUC |
| siRNA 3618 | 3618 | AUAAAAUCUAUUAAAUUUU | 7254 | AAAAUUUAAUAGAUUUUAU |
| siRNA 3619 | 3619 | UAAAAUCUAUUAAAUUUUU | 7255 | AAAAAUUUAAUAGAUUUUA |
| siRNA 3620 | 3620 | AAAAUCUAUUAAAUUUUUC | 7256 | GAAAAAUUUAAUAGAUUUU |
| siRNA 3621 | 3621 | AAAUCUAUUAAAUUUUUCU | 7257 | AGAAAAAUUUAAUAGAUUU |
| siRNA 3622 | 3622 | AAUCUAUUAAAUUUUUCUC | 7258 | GAGAAAAAUUUAAUAGAUU |
| siRNA 3623 | 3623 | AUCUAUUAAAUUUUUCUCC | 7259 | GGAGAAAAAUUUAAUAGAU |
| siRNA 3624 | 3624 | UCUAUUAAAUUUUUCUCCU | 7260 | AGGAGAAAAAUUUAAUAGA |
| siRNA 3625 | 3625 | CUAUUAAAUUUUUCUCCUC | 7261 | GAGGAGAAAAAUUUAAUAG |
| siRNA 3626 | 3626 | UAUUAAAUUUUUCUCCUCU | 7262 | AGAGGAGAAAAAUUUAAUA |
| siRNA 3627 | 3627 | AUUAAAUUUUUCUCCUCUA | 7263 | UAGAGGAGAAAAAUUUAAU |
| siRNA 3628 | 3628 | UUAAAUUUUUCUCCUCUAA | 7264 | UUAGAGGAGAAAAAUUUAA |
| siRNA 3629 | 3629 | UAAAUUUUUCUCCUCUAAA | 7265 | UUUAGAGGAGAAAAAUUUA |
| siRNA 3630 | 3630 | AAAUUUUUCUCCUCUAAAA | 7266 | UUUUAGAGGAGAAAAAUUU |
| siRNA 3631 | 3631 | AAUUUUUCUCCUCUAAAAA | 7267 | UUUUUAGAGGAGAAAAAUU |
| siRNA 3632 | 3632 | AUUUUUCUCCUCUAAAAAC | 7268 | GUUUUUAGAGGAGAAAAAU |
| siRNA 3633 | 3633 | UUUUUCUCCUCUAAAAACU | 7269 | AGUUUUUAGAGGAGAAAAA |
| siRNA 3634 | 3634 | UUUUCUCCUCUAAAAACUG | 7270 | CAGUUUUUAGAGGAGAAAA |
| siRNA 3635 | 3635 | UUUCUCCUCUAAAAACUGA | 7271 | UCAGUUUUUAGAGGAGAAA |
| siRNA 3636 | 3636 | UUCUCCUCUAAAAACUGAA | 7272 | UUCAGUUUUUAGAGGAGAA |

TABLE 2C
Additional Example Sequences

| SEQ ID NO: | Sequence (5′ to 3′) |
|---|---|
| 7599 | AGCAGAGAGAGAGAAAGCGGGAGCCCGCGGCGAGCGTAGCGCAAGTCCGCTCCCTA |
| | GGCATCGCTGCGCTGGCAGCGATTCGCTGTCTCTTGTGAGTCAGGGGACAACGCTTCG |
| | GGGCAACTGTGAGTGCGCGTGTGGGGGACCTCGATTCTCTTCAGATCTCGAGGATTCG |
| | GTCCGGGGACGTCTCCTGATCCCCTACTAAAGCGCCTGCTAACTTTGAAAAGGAGCAC |
| | TGTGTCCTGCAAAGTTTGACACATAAAGGATAGGAAAAGAGAGGAGAGAAAAGCAA |
| | CTGAGTTGAAGGAGAAGGAGCTGATGCGGGCCTCCTGATCAATTAAGAGGAGAGTTA |
| | AACCGCCGAGATCCCGGCGGGACCAAGGAGGTGCGGGGCAAGAAGGAACGGAAGCG |
| | GTGCGATCCACAGGGCTGGGTTTTCTTGCACCTTGGGTCACGCCTCCTTGGCGAGAAA |
| | GCGCCTCGCATTTGATTGCTTCCAGTTATTGCAGAACTTCCTGTCCTGGTGGAGAAGC |
| | GGGTCTCGCTTGGGTTCCGCTAATTTCTGTCCTGAGGCGTGAGACTGAGTTCATAGGG |
| | TCCTGGGTCCCCGAACCAGGAAGGGTTGAGGGAACACAATCTGCAAGCCCCCGCGAC |
| | CCAAGTGAGGGGCCCCGTGTTGGGGTCCTCCCTCCCTTTGCATTCCCACCCCTCCGGG |
| | CTTTGCGTCTTCCTGGGGACCCCCTCGCCGGGAGATGGCCGCGTTGATGCGGAGCAAG |
| | GATTCGTCCTGCTGCCTGCTCCTACTGGCCGCGGTGCTGATGGTGGAGAGCTCACAGA |
| | TCGGCAGTTCGCGGGCCAAACTCAACTCCATCAAGTCCTCTCTGGGGGGGGAGACGC |
| | CTGGTCAGGCCGCCAATCGATCTGCGGGCATGTACCAAGGACTGGCATTCGGCGGCA |
| | GTAAGAAGGGCAAAAACCTGGGGCAGGCCTACCCTTGTAGCAGTGATAAGGAGTGTG |
| | AAGTTGGGAGGTATTGCCACAGTCCCCACCAAGGATCATCGGCCTGCATGGTGTGTC |
| | GGAGAAAAAAGAAGCGCTGCCACCGAGATGGCATGTGCTGCCCCAGTACCCGCTGCA |
| | ATAATGGCATCTGTATCCCAGTTACTGAAAGCATCTTAACCCCTCACATCCCGGCTCT |
| | GGATGGTACTCGGCACAGAGATCGAAACCACGGTCATTACTCAAACCATGACTTGGG |
| | ATGGCAGAATCTAGGAAGACCACACACTAAGATGTCACATATAAAAGGGCATGAAG |
| | GAGACCCCTGCCTACGATCATCAGACTGCATTGAAGGGTTTTGCTGTGCTCGTCATTT |
| | CTGGACCAAAATCTGCAAACCAGTGCTCCATCAGGGGGAAGTCTGTACCAAACAACG |
| | CAAGAAGGGTTCTCATGGGCTGGAAATTTTCCAGCGTTGCGACTGTGCGAAGGGCCT |
| | GTCTTGCAAAGTATGGAAAGATGCCACCTACTCCTCCAAAGCCAGACTCCATGTGTGT |
| | CAGAAAATTTGATCACCATTGAGGAACATCATCAATTGCAGACTGTGAAGTTGTGTAT |
| | TTAATGCATTATAGCATGGTGGAAAATAAGGTTCAGATGCAGAAGAATGGCTAAAAT |
| | AAGAAACGTGATAAGAATATAGATGATCACAAAAAGGGAGAAAGAAAACATGAACT |
| | GAATAGATTAGAATGGGTGACAAATGCAGTGCAGCCAGTGTTTCCATTATGCAACTT |
| | GTCTATGTAAATAATGTACACATTTGTGGAAAATGCTATTATTAAGAGAACAAGCAC |
| | ACAGTGGAAATTACTGATGAGTAGCATGTGACTTTCCAAGAGTTTAGGTTGTGCTGGA |
| | GGAGAGGTTTCCTTCAGATTGCTGATTGCTTATACAAATAACCTACATGCCAGATTTC |
| | TATTCAACGTTAGAGTTTAACAAAATACTCCTAGAATAACTTGTTATACAATAGGTTC |
| | TAAAAATAAAATTGCTAAACAAGAAATGAAAACATGGAGCATTGTTAATTTACAACA |
| | GAAAATTACCTTTTGATTTGTAACACTACTTCTGCTGTTCAATCAAGAGTCTTGGTAG |
| | ATAAGAAAAAAATCAGTCAATATTTCCAAATAATTGCAAAATAATGGCCAGTTGTTT |
| | AGGAAGGCCTTTAGGAAGACAAATAAATAACAAACAAACAGCCACAAATACTTTTTT |
| | TTCAAAATTTTAGTTTTACCTGTAATTAATAAGAACTGATACAAGACAAAAACAGTTC |
| | CTTCAGATTCTACGGAATGACAGTATATCTCTCTTTATCCTATGTGATTCCTGCTCTGA |
| | ATGCATTATATTTTCCAAACTATACCCATAAATTGTGACTAGTAAAATACTTACACAG |
| | AGCAGAATTTTCACAGATGGCAAAAAAATTTAAAGATGTCCAATATATGTGGGAAAA |
| | GAGCTAACAGAGAGATCATTATTTCTTAAAGATTGGCCATAACCTGTATTTTGATAGA |
| | ATTAGATTGGTAAATACATGTATTCATACATACTCTGTGGTAATAGAGACTTGAGCTG |
| | GATCTGTACTGCACTGGAGTAAGCAAGAAAATTGGGAAAACTTTTTCGTTTGTTCAGG |
| | TTTTGGCAACACATAGATCATATGTCTGAGGCACAAGTTGGCTGTTCATCTTTGAAAC |
| | CAGGGGATGCACAGTCTAAATGAATATCTGCATGGGATTTGCTATCATAATATTTACT |
| | ATGCAGATGAATTCAGTGTGAGGTCCTGTGTCCGTACTATCCTCAAATTATTTATTTTA |
| | TAGTGCTGAGATCCTCAAATAATCTCAATTTCAGGAGGTTTCACAAAATGGACTCCTG |
| | AAGTAGACAGAGTAGTGAGGTTTCATTGCCCTCTATAAGCTTCTGACTAGCCAATGGC |
| | ATCATCCAATTTTCTTCCCAAACCTCTGCAGCATCTGCTTTATTGCCAAAGGGCTAGTT |
| | TCGGTTTTCTGCAGCCATTGCGGTTAAAAAATATAAGTAGGATAACTTGTAAAACCTG |
| | CATATTGCTAATCTATAGACACCACAGTTTCTAAATTCTTTGAAACCACTTTACTACTT |
| | TTTTTAAACTTAACTCAGTTCTAAATACTTTGTCTGGAGCACAAAACAATAAAAGGTT |
| | ATCTTATAGTCGTGACTTTAAACTTTTGTAGACCACAATTCACTTTTTAGTTTTCTTTTA |
| | CTTAAATCCCATCTGCAGTCTCAAATTTAAGTTCTCCCAGTAGAGATTGAGTTTGAGC |
| | CTGTATATCTATTAAAAATTTCAACTTCCCACATATATTTACTAAGATGATTAAGACTT |
| | ACATTTTCTGCACAGGTCTGCAAAAACAAAAATTATAAACTAGTCCATCCAAGAACC |
| | AAAGTTTGTATAAACAGGTTGCTATAAGCTTGGTGAAATGAAAATGGAACATTTCAA |
| | TCAAACATTTCCTATATAACAATTATTATATTTACAATTTGGTTTCTGCAATATTTTTC |
| | TTATGTCCACCCTTTTAAAAATTATTATTTGAAGTAATTTATTTACAGGAAATGTTAAT |
| | GAGATGTATTTTCTTATAGAGATATTTCTTACAGAAAGCTTTGTAGCAGAATATATTT |
| | GCAGCTATTGACTTTGTAATTTAGGAAAAATGTATAATAAGATAAAATCTATTAAATT |
| | TTTCTCCTCTAAAAACTGAA |
| 7600 | Modification pattern 1S |
| 7601 | Modification pattern 2S |
| 7602 | Modification pattern 3S |
| 7603 | Modification pattern 4S |
| 7604 | Modification pattern 5S |
| 7642 | Modification pattern 1AS |
| 7643 | Modification pattern 2AS |
| 7645 | Modification pattern 3AS |
| 7646 | Modification pattern 4AS |
| 7647 | modification pattern ASO1 |

### VI. Examples

### Example 1: Variants in DKK2 are Associated with Decreased Risk of Male Pattern Baldness

[0222] Variants in DKK2 were evaluated for associations with male pattern baldness (MBP) in approximately 206,000 male individuals with genotype data from the UK Biobank cohort. Variants evaluated included (1) rs76067940, a low-frequency (AAF=0.0365) intronic variant, and (2) rs35290077, a low-frequency (AAF=0.0428) missense variant (G96R) that is predicted to be deleterious to the DKK2 protein and is a DKK2 protein quantitative trait locus (pQTL) with the alternative (G) allele associated with decreased circulating plasma DKK2. The two variants were considered to be hypomorphic or loss of function variants that may result in a decrease in the abundance or activity of the DKK2 gene product. Stepwise conditional analyses, as well as direct evaluation of linkage disequilibrium, confirmed that they are independent variants.

[0223] These analyses resulted in the identification of genome-wide significant MBP-protective associations for the two variants in DKK2 (Table 3). The directional consistency between the protective effects of the two independent DKK2 variants, together with the known effects of the rs35290077 (G96R) variant on reduced levels of circulating DKK2 protein, indicate that loss-of-function or abundance of DKK2 results in protection from male pattern baldness, and that pharmacological inhibition of DKK2 may be therapeutic for MBP and related traits or diseases.

TABLE 3
DKK2 gene variants associated with protection from MPB

| | | | | Male Pattern Baldness | |
|---|---|---|---|---|---|
| | | | | (n = 37,480) | |
| Variant | Gene | Consequence | AAF | P value | OR |
| rs76067940 | DKK2 | Intronic | 0.0365 | 1.47E−25 | ↓0.763 |
| rs35290077 | DKK2 | Missense | 0.0428 | 2.07E−12 | ↓0.845 |
| | | (G96R), | | | |
| | | ↓ pQTL | | | |

Protective Variants in DKK2 Result in a Reduction of DKK2 mRNA Following Induction with Vitamin D

[0224] Lymphoblastoid cell lines (LCLs) from three age and gender-matched donors with known rs35290077 (G96R) genotypes, including a donor that was homozygous for the reference allele (rs35290077 C/C), a donor that was heterozygous (rs35290077 C/G) and a donor that was homozygous for alternative allele (rs35290077 G/G), were seeded at 500,000 cells/well in 24 well plate in complete growth media and grown overnight. LCLs were treated with 25 nM Vitamin D or vehicle (100% EtOH) for 2 days, and then harvested.

[0225] Cell lysates from Vitamin D and vehicle-treated LCLs were assayed to evaluate DKK2 mRNA expression by qPCR. LCLs from the rs35290077 homozygous reference allele donor (C/C) demonstrate an approximately 2.4-fold increase of DKK2 mRNA expression with Vitamin D treatment compared with vehicle treatment, LCLs from the rs35290077 heterozygous donor (C/G) demonstrate an approximately 1.8-fold increase of DKK2 mRNA expression with Vitamin D treatment compared with vehicle treatment and LCLs from the rs35290077 homozygous alternative allele donor (G/G) demonstrate an approximately 1.2-fold increase of DKK2 mRNA expression with Vitamin D treatment compared with vehicle treatment (FIG. 1). Therefore, each copy of the rs35290077 alternative (G) allele results in approximately 50% reduction of DKK2 mRNA induction in the presence of Vitamin D.

[0226] These data provide experimental verification that DKK2 gene variants associated with protection from MBP result in loss of DKK2 mRNA abundance or function. Accordingly, in some cases therapeutic inhibition or modulation of DKK2 may be an effective genetically-informed method of treatment for MBP and related traits or diseases.

### Example 2: Bioinformatic Selection of Sequences in Order to Identify Therapeutic siRNAs to Downmodulate Expression of the DKK2 mRNA

[0227] Screening sets were defined based on bioinformatic analysis. Therapeutic siRNAs were designed to target human DKK2. Predicted specificity in human, rhesus monkey, cynomolgus monkey, mouse, rat, rabbit, and dog was determined for sense (S) and antisense (AS) strands. These were assigned a “specificity score” which considers the likelihood of unintended downregulation of any other transcript by full or partial complementarity of an siRNA strand (up to 2 mismatches within positions 2-18) as well as the number and positions of mismatches. Thus, off-target(s) transcripts for antisense and sense strands of each siRNA were identified. As identified, siRNAs with high specificity and a low number of predicted off-targets provided a benefit of increased targeting specificity.

[0228] In addition to selecting siRNA sequences with high sequence specificity to DKK2 mRNA, siRNA sequences within the seed region were analyzed for similarity to seed regions of known miRNAs. siRNAs can function in a miRNA like manner via base-pairing with complementary sequences within the 3′-UTR of mRNA molecules. The complementarity typically encompasses the 5′-bases at positions 2-7 of the miRNA (seed region). To circumvent siRNAs to act via functional miRNA binding sites, siRNA strands containing natural miRNA seed regions can be avoided. Seed regions identified in miRNAs from human, mouse, rat, rhesus monkey, dog, rabbit, and pig are referred to as “conserved”. Combining the “specificity score” with miRNA seed analysis yielded a “specificity category”. This is divided into categories 1-4, with 1 having the highest specificity and 4 having the lowest specificity. Each strand of the siRNA is assigned to a specificity category.

[0229] Analysis of the Genome Aggregation Database (gnomAD) to identify siRNAs targeting regions with known SNPs was also carried out to identify siRNAs that may be non-functional in individuals containing the SNP. Information regarding the positions of SNPs within the target sequence as well as minor allele frequency (MAF) in case data was obtained in this analysis.

[0230] Initial analysis of the relevant DKK2 mRNA sequence revealed few sequences that fulfil the specificity parameters and at the same time target DKK2 mRNA in all the analyzed relevant species. Therefore, independent screening subsets were designed for the therapeutic siRNAs.

[0231] The siRNAs in these subsets recognized at least the human DKK2 sequences. Therefore, the siRNAs in these subsets can be used to target human DKK2 in a therapeutic setting.

[0232] The number of siRNA sequences derived from human DKK2 mRNA (ENST00000285311, SEQ ID NO: 7599) without consideration of specificity or species cross-reactivity was 3636 (sense and antisense strand sequences included in SEQ ID NOS: 1-3636 and 3637-7272, respectively).

[0233] Prioritizing sequences for target specificity, absence of miRNA seed region sequences and SNPs as described above yielded subset A. Subset A contained 741 siRNAs, including siRNAs 12, 13, 21, 22, 24, 27, 29, 30, 31, 34, 35, 36, 38, 39, 40, 42, 43, 46, 47, 48, 51, 53, 54, 60, 63, 64, 65, 66, 67, 68, 69, 70, 74, 76, 77, 81, 84, 93, 94, 95, 98, 102, 103, 104, 105, 107, 117, 118, 119, 122, 124, 130, 131, 132, 135, 136, 137, 142, 144, 145, 149, 150, 156, 157, 159, 160, 161, 164, 165, 166, 167, 168, 169, 170, 175, 179, 180, 181, 184, 186, 188, 189, 190, 191, 192, 193, 196, 197, 198, 203, 204, 205, 211, 219, 220, 228, 229, 231, 233, 241, 242, 243, 245, 278, 283, 297, 303, 304, 308, 312, 314, 316, 317, 319, 323, 324, 325, 331, 332, 333, 335, 336, 338, 339, 340, 341, 350, 351, 411, 418, 421, 422, 425, 428, 435, 436, 439, 440, 442, 443, 445, 446, 447, 450, 455, 456, 457, 458, 459, 462, 463, 470, 472, 505, 512, 513, 514, 517, 518, 519, 520, 521, 522, 524, 525, 531, 532, 535, 537, 539, 543, 571, 572, 573, 574, 576, 577, 583, 586, 605, 609, 611, 616, 618, 666, 669, 670, 671, 677, 678, 680, 682, 698, 701, 703, 707, 712, 717, 718, 720, 721, 722, 724, 727, 728, 733, 735, 736, 737, 739, 762, 764, 784, 785, 788, 791, 792, 793, 794, 795, 798, 799, 800, 801, 802, 803, 807, 808, 809, 810, 811, 812, 813, 822, 824, 827, 831, 839, 850, 851, 852, 856, 862, 864, 865, 867, 868, 869, 870, 871, 872, 873, 874, 875, 876, 877, 878, 879, 880, 882, 883, 886, 892, 895, 896, 897, 898, 899, 900, 902, 903, 904, 905, 906, 908, 912, 918, 924, 925, 938, 939, 940, 941, 943, 949, 950, 951, 958, 963, 964, 970, 973, 974, 976, 978, 981, 983, 984, 1010, 1011, 1013, 1021, 1022, 1036, 1042, 1045, 1049, 1051, 1052, 1053, 1063, 1073, 1076, 1078, 1081, 1083, 1089, 1090, 1094, 1095, 1097, 1118, 1119, 1125, 1130, 1136, 1162, 1167, 1168, 1169, 1170, 1171, 1172, 1173, 1174, 1175, 1176, 1180, 1182, 1197, 1203, 1214, 1218, 1219, 1221, 1223, 1227, 1229, 1236, 1257, 1262, 1263, 1265, 1266, 1268, 1270, 1274, 1292, 1295, 1298, 1302, 1303, 1305, 1308, 1309, 1319, 1320, 1325, 1328, 1340, 1346, 1347, 1352, 1354, 1355, 1361, 1362, 1368, 1369, 1370, 1371, 1373, 1374, 1376, 1377, 1378, 1379, 1383, 1384, 1389, 1424, 1425, 1426, 1427, 1436, 1437, 1443, 1446, 1447, 1481, 1487, 1488, 1489, 1496, 1498, 1504, 1505, 1511, 1512, 1519, 1530, 1550, 1562, 1565, 1566, 1567, 1571, 1574, 1595, 1597, 1604, 1605, 1607, 1608, 1610, 1611, 1612, 1615, 1616, 1617, 1619, 1646, 1651, 1654, 1656, 1658, 1661, 1664, 1665, 1666, 1668, 1707, 1708, 1711, 1731, 1736, 1744, 1752, 1753, 1772, 1783, 1790, 1804, 1808, 1809, 1812, 1818, 1835, 1838, 1851, 1859, 1862, 1866, 1867, 1871, 1874, 1875, 1876, 1877, 1878, 1881, 1883, 1885, 1886, 1887, 1888, 1889, 1891, 1892, 1895, 1896, 1910, 1913, 1915, 1916, 1918, 1919, 1926, 1928, 1929, 1932, 1933, 1934, 1962, 1985, 1992, 1999, 2013, 2020, 2021, 2024, 2032, 2033, 2038, 2043, 2047, 2048, 2084, 2089, 2098, 2103, 2108, 2111, 2112, 2113, 2119, 2120, 2126, 2157, 2183, 2190, 2198, 2206, 2207, 2210, 2232, 2233, 2236, 2237, 2238, 2242, 2248, 2250, 2253, 2254, 2259, 2267, 2270, 2276, 2281, 2282, 2317, 2319, 2320, 2321, 2324, 2331, 2334, 2342, 2348, 2352, 2366, 2367, 2379, 2380, 2382, 2385, 2401, 2402, 2405, 2407, 2410, 2413, 2414, 2462, 2467, 2469, 2470, 2522, 2531, 2535, 2537, 2558, 2561, 2564, 2565, 2566, 2570, 2588, 2589, 2590, 2614, 2615, 2616, 2629, 2638, 2644, 2668, 2671, 2675, 2678, 2682, 2686, 2696, 2703, 2704, 2708, 2709, 2712, 2717, 2718, 2719, 2720, 2721, 2722, 2723, 2724, 2725, 2726, 2727, 2729, 2730, 2731, 2735, 2758, 2761, 2768, 2770, 2774, 2796, 2809, 2810, 2811, 2813, 2819, 2821, 2822, 2823, 2829, 2832, 2842, 2847, 2848, 2849, 2850, 2851, 2852, 2853, 2854, 2860, 2861, 2864, 2867, 2868, 2871, 2914, 2916, 2918, 2919, 2920, 2921, 2922, 2923, 2924, 2926, 2929, 2941, 2948, 2962, 2969, 2983, 2988, 2992, 2993, 2996, 2997, 2998, 2999, 3000, 3003, 3004, 3006, 3013, 3022, 3028, 3032, 3037, 3042, 3054, 3055, 3057, 3064, 3065, 3071, 3073, 3080, 3128, 3129, 3136, 3137, 3164, 3169, 3179, 3199, 3201, 3204, 3205, 3218, 3219, 3220, 3224, 3257, 3269, 3292, 3314, 3317, 3318, 3320, 3322, 3324, 3327, 3328, 3329, 3333, 3341, 3350, 3352, 3353, 3354, 3357, 3358, 3362, 3363, 3364, 3386, 3388, 3404, 3433, 3441, 3453, 3457, 3508, 3525, 3545, 3547, 3555, 3556, 3564, 3572, 3579, and 3636.

[0234] The siRNAs in subset A had the following characteristics: Cross-reactivity: With 19mer in human DKK2 mRNA; Specificity category: For human: AS2 or better, SS3 or better; and miRNA seeds: AS+SS strand: seed region not conserved in human, mouse, and rat and not present in >4 species; Off-target frequency: ≤30 human off-targets matched with 2 mismatches in antisense strand; and SNPs: siRNA target sites do not harbor SNPs with a MAF≥1% (pos. 2-18).

[0235] The siRNA sequences in subset A were selected for more stringent specificity to yield subset B. Subset B included 735 siRNAs, including siRNAs 12, 13, 21, 22, 24, 27, 29, 30, 31, 34, 35, 36, 38, 39, 40, 42, 43, 46, 47, 48, 51, 53, 54, 60, 63, 64, 65, 66, 67, 68, 69, 70, 74, 76, 77, 81, 84, 93, 94, 95, 98, 102, 103, 104, 105, 107, 117, 118, 119, 124, 130, 131, 132, 135, 136, 137, 142, 144, 145, 149, 150, 156, 157, 159, 160, 161, 164, 165, 166, 167, 168, 169, 170, 175, 179, 180, 181, 184, 186, 188, 189, 190, 191, 192, 193, 196, 197, 198, 203, 204, 205, 211, 219, 220, 228, 229, 231, 233, 242, 243, 245, 278, 283, 303, 304, 308, 312, 314, 316, 317, 319, 323, 324, 325, 331, 332, 333, 335, 336, 338, 339, 340, 341, 350, 351, 411, 418, 421, 422, 425, 428, 435, 436, 439, 440, 442, 443, 445, 446, 447, 450, 455, 456, 457, 458, 459, 462, 463, 470, 472, 505, 512, 513, 514, 517, 518, 519, 520, 521, 522, 524, 525, 531, 532, 535, 537, 539, 543, 571, 572, 573, 574, 576, 577, 583, 586, 605, 609, 611, 616, 618, 666, 669, 670, 671, 677, 678, 680, 682, 698, 701, 703, 707, 712, 717, 718, 720, 721, 722, 724, 727, 728, 733, 735, 736, 737, 739, 762, 764, 784, 785, 788, 791, 792, 793, 794, 795, 798, 799, 800, 801, 802, 803, 807, 808, 809, 810, 811, 812, 813, 822, 824, 827, 831, 839, 850, 851, 852, 856, 862, 864, 865, 867, 868, 869, 870, 871, 872, 873, 874, 875, 876, 877, 878, 879, 880, 882, 883, 886, 892, 895, 896, 897, 898, 899, 900, 902, 903, 904, 905, 906, 908, 912, 918, 924, 925, 938, 939, 940, 941, 943, 949, 950, 951, 958, 963, 964, 970, 973, 974, 976, 978, 981, 983, 984, 1010, 1011, 1013, 1021, 1022, 1036, 1042, 1045, 1049, 1051, 1052, 1053, 1063, 1073, 1076, 1078, 1081, 1083, 1089, 1090, 1094, 1095, 1097, 1118, 1119, 1125, 1130, 1136, 1162, 1167, 1168, 1169, 1170, 1171, 1172, 1173, 1174, 1175, 1176, 1180, 1182, 1197, 1203, 1214, 1218, 1219, 1221, 1223, 1227, 1229, 1236, 1257, 1262, 1263, 1265, 1266, 1268, 1270, 1274, 1292, 1295, 1298, 1302, 1303, 1305, 1308, 1309, 1319, 1320, 1325, 1328, 1340, 1346, 1347, 1352, 1354, 1355, 1361, 1362, 1368, 1369, 1370, 1371, 1373, 1374, 1376, 1377, 1378, 1379, 1383, 1384, 1389, 1424, 1425, 1426, 1427, 1436, 1437, 1443, 1446, 1447, 1481, 1487, 1488, 1489, 1496, 1498, 1504, 1505, 1511, 1512, 1519, 1530, 1550, 1562, 1565, 1566, 1567, 1571, 1574, 1595, 1597, 1604, 1605, 1607, 1608, 1610, 1611, 1612, 1615, 1616, 1617, 1619, 1651, 1654, 1656, 1658, 1661, 1664, 1665, 1666, 1668, 1707, 1708, 1711, 1731, 1736, 1744, 1752, 1753, 1772, 1783, 1790, 1804, 1808, 1809, 1812, 1818, 1835, 1838, 1851, 1859, 1862, 1866, 1871, 1874, 1875, 1876, 1877, 1878, 1881, 1883, 1885, 1886, 1887, 1888, 1889, 1891, 1892, 1895, 1896, 1910, 1913, 1915, 1916, 1918, 1919, 1926, 1928, 1929, 1932, 1933, 1934, 1962, 1985, 1992, 1999, 2013, 2020, 2021, 2024, 2032, 2033, 2038, 2043, 2047, 2048, 2084, 2089, 2098, 2103, 2108, 2111, 2112, 2113, 2119, 2120, 2126, 2157, 2183, 2190, 2198, 2206, 2207, 2210, 2232, 2233, 2236, 2237, 2238, 2242, 2248, 2250, 2253, 2254, 2259, 2267, 2270, 2276, 2281, 2282, 2317, 2319, 2320, 2321, 2324, 2331, 2334, 2342, 2348, 2352, 2366, 2367, 2379, 2380, 2382, 2385, 2401, 2402, 2405, 2407, 2410, 2413, 2414, 2462, 2467, 2469, 2470, 2522, 2531, 2535, 2537, 2558, 2561, 2564, 2565, 2566, 2570, 2588, 2589, 2590, 2614, 2615, 2616, 2629, 2638, 2644, 2668, 2671, 2675, 2678, 2682, 2686, 2696, 2703, 2704, 2708, 2709, 2712, 2717, 2718, 2719, 2720, 2721, 2722, 2723, 2724, 2725, 2726, 2727, 2729, 2730, 2731, 2735, 2758, 2761, 2768, 2770, 2774, 2796, 2809, 2810, 2811, 2813, 2819, 2821, 2822, 2823, 2829, 2832, 2842, 2847, 2848, 2849, 2850, 2851, 2852, 2853, 2854, 2860, 2861, 2864, 2867, 2868, 2871, 2914, 2916, 2918, 2919, 2920, 2921, 2922, 2923, 2924, 2926, 2929, 2941, 2948, 2962, 2969, 2983, 2988, 2992, 2993, 2996, 2997, 2998, 2999, 3000, 3003, 3004, 3006, 3013, 3022, 3028, 3032, 3037, 3042, 3054, 3055, 3057, 3064, 3065, 3071, 3073, 3080, 3128, 3129, 3136, 3137, 3164, 3169, 3179, 3199, 3201, 3204, 3205, 3218, 3219, 3220, 3224, 3257, 3269, 3292, 3314, 3317, 3318, 3320, 3322, 3324, 3327, 3328, 3329, 3333, 3341, 3350, 3352, 3353, 3354, 3357, 3358, 3362, 3363, 3364, 3386, 3388, 3404, 3433, 3441, 3453, 3457, 3508, 3545, 3547, 3555, 3556, 3564, 3572, 3579, and 3636.

[0236] The siRNAs in subset B had the following characteristics: Cross-reactivity: With 19mer in human DKK2 mRNA; Specificity category: For human: AS2 or better, SS3 or better; miRNA seeds: AS+SS strand: seed region not conserved in human, mouse, and rat and not present in >4 species; Off-target frequency: ≤20 human off-targets matched with 2 mismatches in antisense strand; and SNPs: siRNA target sites do not harbor SNPs with a MAF≥1% (pos. 2-18).

[0237] The siRNA sequences in subset B were further selected for absence of seed regions in the AS strand that are identical to a seed region of known human miRNA to yield subset C. Subset C includes 489 siRNAs, including siRNAs 12, 13, 21, 22, 24, 27, 29, 30, 31, 35, 36, 40, 43, 46, 47, 48, 51, 53, 54, 60, 63, 64, 65, 66, 67, 68, 69, 74, 76, 81, 84, 93, 94, 95, 102, 103, 105, 107, 119, 122, 130, 131, 132, 135, 136, 142, 144, 149, 150, 156, 157, 159, 160, 165, 166, 167, 168, 170, 175, 184, 186, 188, 190, 191, 192, 198, 203, 220, 228, 229, 231, 233, 241, 242, 243, 278, 283, 297, 308, 312, 314, 316, 317, 324, 331, 332, 333, 338, 340, 351, 418, 422, 425, 435, 439, 440, 445, 446, 456, 457, 459, 462, 470, 472, 513, 514, 517, 518, 521, 522, 524, 525, 535, 539, 543, 571, 572, 573, 576, 586, 605, 611, 616, 669, 677, 678, 680, 682, 698, 703, 707, 712, 717, 720, 722, 724, 728, 735, 736, 737, 739, 762, 764, 784, 785, 788, 791, 792, 793, 794, 795, 798, 799, 800, 801, 807, 809, 810, 811, 813, 822, 824, 850, 851, 864, 865, 867, 869, 872, 874, 875, 876, 877, 879, 880, 882, 883, 886, 892, 895, 896, 897, 898, 899, 902, 903, 904, 905, 908, 918, 924, 938, 940, 949, 951, 963, 964, 970, 973, 974, 976, 1011, 1022, 1045, 1049, 1051, 1063, 1076, 1083, 1089, 1090, 1094, 1097, 1125, 1130, 1136, 1162, 1167, 1168, 1169, 1170, 1171, 1172, 1176, 1180, 1182, 1218, 1219, 1221, 1229, 1262, 1263, 1266, 1270, 1274, 1292, 1295, 1298, 1302, 1308, 1309, 1325, 1328, 1340, 1347, 1352, 1355, 1361, 1362, 1368, 1370, 1371, 1376, 1377, 1379, 1384, 1389, 1424, 1426, 1427, 1436, 1437, 1443, 1446, 1447, 1481, 1487, 1488, 1489, 1496, 1498, 1504, 1511, 1512, 1519, 1562, 1565, 1566, 1571, 1574, 1595, 1597, 1604, 1605, 1607, 1610, 1611, 1612, 1616, 1617, 1646, 1651, 1654, 1656, 1658, 1661, 1666, 1668, 1707, 1708, 1711, 1731, 1744, 1772, 1783, 1804, 1808, 1812, 1818, 1838, 1851, 1859, 1862, 1866, 1874, 1876, 1877, 1878, 1881, 1883, 1885, 1886, 1887, 1888, 1892, 1895, 1910, 1913, 1916, 1919, 1926, 1928, 1929, 1932, 1933, 1962, 1985, 1999, 2013, 2032, 2033, 2038, 2043, 2047, 2048, 2084, 2089, 2108, 2113, 2120, 2126, 2157, 2183, 2190, 2207, 2210, 2232, 2233, 2236, 2237, 2238, 2248, 2250, 2254, 2259, 2267, 2270, 2281, 2282, 2319, 2324, 2331, 2334, 2348, 2380, 2382, 2385, 2401, 2402, 2405, 2414, 2462, 2467, 2470, 2522, 2531, 2535, 2537, 2558, 2561, 2564, 2565, 2570, 2588, 2589, 2590, 2614, 2615, 2616, 2629, 2638, 2671, 2675, 2682, 2686, 2717, 2718, 2720, 2721, 2722, 2723, 2724, 2726, 2731, 2735, 2770, 2774, 2796, 2809, 2821, 2823, 2829, 2847, 2848, 2849, 2853, 2854, 2860, 2861, 2868, 2914, 2920, 2921, 2922, 2923, 2941, 2948, 2962, 2969, 2983, 2988, 2992, 2993, 2996, 2998, 2999, 3000, 3004, 3013, 3022, 3028, 3032, 3042, 3054, 3055, 3064, 3071, 3080, 3128, 3129, 3136, 3137, 3179, 3201, 3218, 3219, 3220, 3257, 3314, 3317, 3329, 3333, 3341, 3352, 3353, 3354, 3358, 3363, 3364, 3386, 3388, 3404, 3508, 3525, 3545, 3556, 3564, 3572, and 3636.

[0238] The siRNAs in subset C had the following characteristics: Cross-reactivity: With 19mer in human DKK2 mRNA; Specificity category: For human: AS2 or better, SS3 or better; miRNA seeds: AS+SS strand: seed region not conserved in human, mouse, and rat and not present in >4 species. AS strand: seed region not identical to seed region of known human miRNA; Off-target frequency: ≤30 human off-targets matched with 2 mismatches by antisense strand; and SNPs: siRNA target sites do not harbor SNPs with a MAF≥1% (pos. 2-18).

[0239] The siRNA sequences in subset C were also selected for absence of seed regions in the AS or S strands that are identical to a seed region of known human miRNA in addition to having an off-target frequency of ≤30 human off-targets matched with 2 mismatches by antisense strand to yield subset D. Subset D includes 311 siRNAs, including siRNAs 12, 24, 29, 30, 31, 35, 36, 40, 43, 46, 47, 51, 64, 65, 66, 74, 76, 94, 95, 103, 105, 122, 130, 131, 142, 144, 160, 166, 167, 168, 186, 190, 192, 220, 229, 233, 241, 242, 243, 283, 308, 324, 338, 340, 351, 418, 422, 435, 445, 446, 456, 459, 462, 470, 472, 514, 517, 518, 521, 522, 524, 543, 571, 572, 576, 586, 605, 616, 669, 680, 707, 712, 720, 722, 724, 728, 737, 739, 764, 785, 791, 792, 795, 798, 801, 807, 809, 810, 811, 813, 824, 864, 865, 867, 872, 874, 875, 876, 877, 879, 883, 892, 895, 905, 908, 918, 940, 963, 964, 970, 1011, 1022, 1045, 1051, 1083, 1089, 1090, 1094, 1097, 1125, 1130, 1136, 1167, 1168, 1169, 1170, 1176, 1180, 1218, 1221, 1229, 1274, 1298, 1302, 1308, 1309, 1340, 1347, 1355, 1361, 1362, 1370, 1376, 1379, 1384, 1389, 1424, 1437, 1443, 1446, 1447, 1487, 1488, 1489, 1496, 1498, 1512, 1519, 1562, 1574, 1595, 1597, 1604, 1605, 1607, 1610, 1611, 1616, 1646, 1651, 1654, 1656, 1661, 1666, 1668, 1708, 1772, 1783, 1804, 1808, 1812, 1838, 1851, 1859, 1862, 1866, 1874, 1877, 1878, 1881, 1885, 1886, 1887, 1895, 1910, 1913, 1916, 1926, 1928, 1929, 1932, 1933, 1962, 1985, 1999, 2033, 2038, 2043, 2047, 2084, 2089, 2113, 2120, 2126, 2157, 2190, 2207, 2210, 2233, 2236, 2248, 2250, 2259, 2267, 2270, 2282, 2319, 2324, 2331, 2334, 2348, 2380, 2382, 2402, 2405, 2414, 2462, 2467, 2531, 2537, 2558, 2564, 2570, 2589, 2590, 2614, 2671, 2675, 2682, 2686, 2718, 2720, 2721, 2722, 2723, 2735, 2770, 2774, 2796, 2809, 2847, 2848, 2849, 2854, 2860, 2861, 2868, 2914, 2920, 2921, 2923, 2941, 2948, 2962, 2969, 2983, 2988, 2993, 2996, 2998, 2999, 3000, 3004, 3013, 3032, 3042, 3054, 3055, 3080, 3128, 3129, 3136, 3218, 3219, 3317, 3329, 3333, 3341, 3352, 3353, 3354, 3358, 3363, 3364, 3388, 3404, 3508, 3525, 3556, 3564, and 3572.

[0240] The siRNA sequences in subset D were also selected to have an off-target frequency of ≤20 human off-targets matched with 2 mismatches by antisense strand to yield subset E. Subset E includes 307 siRNAs, including siRNAs 12, 24, 29, 30, 31, 35, 36, 40, 43, 46, 47, 51, 64, 65, 66, 74, 76, 94, 95, 103, 105, 130, 131, 142, 144, 160, 166, 167, 168, 186, 190, 192, 220, 229, 233, 242, 243, 283, 308, 324, 338, 340, 351, 418, 422, 435, 445, 446, 456, 459, 462, 470, 472, 514, 517, 518, 521, 522, 524, 543, 571, 572, 576, 586, 605, 616, 669, 680, 707, 712, 720, 722, 724, 728, 737, 739, 764, 785, 791, 792, 795, 798, 801, 807, 809, 810, 811, 813, 824, 864, 865, 867, 872, 874, 875, 876, 877, 879, 883, 892, 895, 905, 908, 918, 940, 963, 964, 970, 1011, 1022, 1045, 1051, 1083, 1089, 1090, 1094, 1097, 1125, 1130, 1136, 1167, 1168, 1169, 1170, 1176, 1180, 1218, 1221, 1229, 1274, 1298, 1302, 1308, 1309, 1340, 1347, 1355, 1361, 1362, 1370, 1376, 1379, 1384, 1389, 1424, 1437, 1443, 1446, 1447, 1487, 1488, 1489, 1496, 1498, 1512, 1519, 1562, 1574, 1595, 1597, 1604, 1605, 1607, 1610, 1611, 1616, 1651, 1654, 1656, 1661, 1666, 1668, 1708, 1772, 1783, 1804, 1808, 1812, 1838, 1851, 1859, 1862, 1866, 1874, 1877, 1878, 1881, 1885, 1886, 1887, 1895, 1910, 1913, 1916, 1926, 1928, 1929, 1932, 1933, 1962, 1985, 1999, 2033, 2038, 2043, 2047, 2084, 2089, 2113, 2120, 2126, 2157, 2190, 2207, 2210, 2233, 2236, 2248, 2250, 2259, 2267, 2270, 2282, 2319, 2324, 2331, 2334, 2348, 2380, 2382, 2402, 2405, 2414, 2462, 2467, 2531, 2537, 2558, 2564, 2570, 2589, 2590, 2614, 2671, 2675, 2682, 2686, 2718, 2720, 2721, 2722, 2723, 2735, 2770, 2774, 2796, 2809, 2847, 2848, 2849, 2854, 2860, 2861, 2868, 2914, 2920, 2921, 2923, 2941, 2948, 2962, 2969, 2983, 2988, 2993, 2996, 2998, 2999, 3000, 3004, 3013, 3032, 3042, 3054, 3055, 3080, 3128, 3129, 3136, 3218, 3219, 3317, 3329, 3333, 3341, 3352, 3353, 3354, 3358, 3363, 3364, 3388, 3404, 3508, 3556, 3564, and 3572.

[0241] Therapeutic siRNAs were designed to target human DKK2 as described above and, in some cases, the DKK2 sequence of at least one toxicology-relevant species, in this case, the non-human primate (NHP) cynomolgus monkey. The siRNAs included in subset F had the following characteristics: Cross-reactivity: With 19mer in human DKK2 mRNA, with 17mer/19mer in NHP DKK2; Specificity category: For human and NHP: AS2 or better, SS3 or better.

[0242] Subset F includes 40 siRNAs, including siRNAs 822, 824, 827, 918, 949, 950, 951, 1083, 1180, 1182, 1203, 1214, 1218, 1219, 1221, 1223, 1227, 1229, 1236, 1292, 1319, 1320, 1325, 1328, 1443, 1446, 1550, 2348, 2588, 2589, 2590, 3508, 3525, 3545, 3547, 3555, 3556, 3564, 3572, and 3579.

[0243] In some cases, the sense strand of any of the siRNAs of subset F comprises siRNA with a particular modification pattern. In this modification pattern, position 9 counting from the 5′ end of the of the sense strand is has the 2′F modification. If position 9 of the sense strand is a pyrimidine, then all purines in the sense strand have the 2′OMe modification. If position 9 is the only pyrimidine between positions 5 and 11 of the sense stand, then position 9 is the only position with the 2′F modification in the sense strand. If position 9 and only one other base between positions 5 and 11 of the sense strand are pyrimidines, then both of these pyrimidines are the only two positions with the 2′F modification in the sense strand. If position 9 and only two other bases between positions 5 and 11 of the sense strand are pyrimidines, and those two other pyrimidines are in adjacent positions so that there would be not three 2′F modifications in a row, then any combination of 2′F modifications can be made that give three 2′F modifications in total. If there are >2 pyrimidines between positions 5 and 11 of the sense strand, then all combinations of pyrimidines having the 2′F modification are allowed that have three to five 2′F modifications in total, provided that the sense strand does not have three 2′F modifications in a row.

[0244] If position 9 of the sense strand is a purine, then all purines in the sense strand have the 2′OMe modification. If position 9 is the only purine between positions 5 and 11 of the sense stand, then position 9 is the only position with the 2′F modification in the sense strand. If position 9 and only one other base between positions 5 and 11 of the sense strand are purines, then both of these purines are the only two positions with the 2′F modification in the sense strand. If position 9 and only two other bases between positions 5 and 11 of the sense strand are purines, and those two other purines are in adjacent positions so that there would be not three 2′F modifications in a row, then any combination of 2′F modifications can be made that give three 2′F modifications in total. If there are >2 purines between positions 5 and 11 of the sense strand, then all combinations of purines having the 2′F modification are allowed that have three to five 2′F modifications in total, provided that the sense strand does not have three 2′F modifications in a row.

[0245] In some cases, position 9 of the sense strand can be a 2′deoxy. In these cases, 2′F and 2′OMe modifications may occur at the other positions of the sense strand.

[0246] In some cases, the sense strand of any of the siRNAs of subset F comprises a modification pattern which conforms to these sense strand rules (Table 4).

[0247] In some cases, the antisense strand of any of the siRNAs of subset F comprise a modification or modification pattern. Some such examples are included in Table 4. Table 5 includes some additional sense strand modifications of the siRNAs in subset F. The siRNAs in subset F may comprise any other modification pattern(s). In Table 4 and Table 5, Nf (e.g. At Cf, Gf, Tf, or Uf) is a 2′ fluoro-modified nucleoside, dN (e.g. dA, dC, dG, dT, or dU) is a 2′ deoxy-modified nucleoside, n (e.g. a, c, g, t, or u) is a 2′ O-methyl modified nucleoside, and “s” is a phosphorothioate linkage.

TABLE 4
Modified Screening Set (Subset G)

| | SEQ ID | Sense strand sequence | SEQ ID | Antisense strand sequence |
|---|---|---|---|---|
| siRNA Name | NO: | (5′-3′) | NO: | (5′-3′) |
| siRNA 7273 | 7273 | aaacUfCfaaCfUfccaucaagasusu | 7313 | usCfsuUfgAfuGfgAfgUfuGfaGfuUfususu |
| siRNA 7274 | 7274 | acucaaCfUfCfCfaucaagucasusu | 7314 | usGfsaCfuUfgAfuGfgAfgUfuGfaGfususu |
| siRNA 7275 | 7275 | caacUfCfcaUfCfaaguccucasusu | 7315 | usGfsaGfgAfcUfuGfaUfgGfaGfuUfgsusu |
| siRNA 7276 | 7276 | aguaaGfAfAfGfggcaaaaacasusu | 7316 | usGfsuUfuUfuGfcCfcUfuCfuUfaCfususu |
| siRNA 7277 | 7277 | acccuuGfuAfGfcagugauaasusu | 7317 | usUfsaUfcAfcUfgCfuAfcAfaGfgGfususu |
| siRNA 7278 | 7278 | cccuuguAfGfcAfgugauaaasusu | 7318 | usUfsuAfuCfaCfuGfcUfaCfaAfgGfgsusu |
| siRNA 7279 | 7279 | ccuugUfagCfagugauaagasusu | 7319 | usCfsuUfaUfcAfcUfgCfuAfcAfaGfgsusu |
| siRNA 7280 | 7280 | cgcugCfaaUfaauggcaucasusu | 7320 | usGfsaUfgCfcAfuUfaUfuGfcAfgCfgsusu |
| siRNA 7281 | 7281 | gucaUfUfaCfUfcaaaccaugasusu | 7321 | usCfsaUfgGfuUfuGfaGfuAfaUfgAfcsusu |
| siRNA 7282 | 7282 | cauuAfcucAfAfaccaugacasusu | 7322 | usGfsuCfaUfgGfuUfuGfaGfuAfaUfgsusu |
| siRNA 7283 | 7283 | ggauGfgcAfGfaaucuaggaasusu | 7323 | usUfscCfuAfgAfuUfcUfgCfcAfuCfcsusu |
| siRNA 7284 | 7284 | ucuagGfAfAfGfAfccacacacasusu | 7324 | usGfsuGfuGfuGfgUfcUfuCfcUfaGfasusu |
| siRNA 7285 | 7285 | ggaaGfAfccAfcAfcacuaagasusu | 7325 | usCfsuUfaGfuGfuGfuGfgUfcUfuCfcsusu |
| siRNA 7286 | 7286 | gaagaCfCfaCfaCfacuaagaasusu | 7326 | usUfscUfuAfgUfgUfgUfgGfuCfuUfcsusu |
| siRNA 7287 | 7287 | agacCfaCfaCfaCfuaagaugasusu | 7327 | usCfsaUfcUfuAfgUfgUfgUfgGfuCfususu |
| siRNA 7288 | 7288 | accaCfaCfaCfUfaagaugucasusu | 7328 | usGfsaCfaUfcUfuAfgUfgUfgUfgGfususu |
| siRNA 7289 | 7289 | cacacuAfAfGfAfugucacauasusu | 7329 | usAfsuGfuGfaCfaUfcUfuAfgUfgUfgsusu |
| siRNA 7290 | 7290 | cacuaagaUfgUfcacauauasusu | 7330 | usAfsuAfuGfuGfaCfaUfcUfuAfgUfgsusu |
| siRNA 7291 | 7291 | auguCfaCfaUfaUfaaaagggasusu | 7331 | usCfscCfuUfuUfaUfaUfgUfgAfcAfususu |
| siRNA 7292 | 7292 | ugaagggUfUfuUfgcugugcasusu | 7332 | usGfscAfcAfgCfaAfaAfcCfcUfuCfasusu |
| siRNA 7293 | 7293 | cuggAfccAfAfaAfucugcaaasusu | 7333 | usUfsuGfcAfgAfuUfuUfgGfuCfcAfgsusu |
| siRNA 7294 | 7294 | uggaccAfAfAfAfucugcaaaasusu | 7334 | usUfsuUfgCfaGfaUfuUfuGfgUfcCfasusu |
| siRNA 7295 | 7295 | caaaAfucuGfcAfaaccaguasusu | 7335 | usAfscUfgGfuUfuGfcAfgAfuUfuUfgsusu |
| siRNA 7296 | 7296 | aaucuGfcAfAfaccagugcuasusu | 7336 | usAfsgCfaCfuGfgUfuUfgCfaGfaUfususu |
| siRNA 7297 | 7297 | guauggAfaAfgAfugccaccasusu | 7337 | usGfsgUfgGfcAfuCfuUfuCfcAfuAfcsusu |
| siRNA 7298 | 7298 | uggaaagaUfgCfcaccuacasusu | 7338 | usGfsuAfgGfuGfgCfaUfcUfuUfcCfasusu |
| siRNA 7299 | 7299 | uaaugCfaUfUfaUfagcauggasusu | 7339 | usCfscAfuGfcUfaUfaAfuGfcAfuUfasusu |
| siRNA 7300 | 7300 | acacagagCfagaauuuucasusu | 7340 | usGfsaAfaAfuUfcUfgCfuCfuGfuGfususu |
| siRNA 7301 | 7301 | uggcaaCfaCfaUfagaucauasusu | 7341 | usAfsuGfaUfcUfaUfgUfgUfuGfcCfasusu |
| siRNA 7302 | 7302 | ggcaAfcAfcAfuagaucauaasusu | 7342 | usUfsaUfgAfuCfuAfuGfuGfuUfgCfcsusu |
| siRNA 7303 | 7303 | gcaaCfaCfaUfagaucauauasusu | 7343 | usAfsuAfuGfaUfcUfaUfgUfgUfuGfcsusu |
| siRNA 7304 | 7304 | gaaau GfuuAfAfugagauguasusu | 7344 | usAfscAfuCfuCfaUfuAfaCfaUfuUfcsusu |
| siRNA 7305 | 7305 | uauuuUfCfuUfaUfagagauaasusu | 7345 | usUfsaUfcUfcUfaUfaAfgAfaAfaUfasusu |
| siRNA 7306 | 7306 | ucuuAfcAfgAfaagcuuuguasusu | 7346 | usAfscAfaAfgCfuUfuCfuGfuAfaGfasusu |
| siRNA 7307 | 7307 | uuacAfgAfaAfGfcuuuguagasusu | 7347 | usCfsuAfcAfaAfgCfuUfuCfuGfuAfasusu |
| siRNA 7308 | 7308 | agcuuuGfuAfGfcagaauauasusu | 7348 | usAfsuAfuUfcUfgCfuAfcAfaAfgCfususu |
| siRNA 7309 | 7309 | gcuuuGfuaGfcAfgaauauaasusu | 7349 | usUfsaUfaUfuCfuGfcUfaCfaAfaGfcsusu |
| siRNA 7310 | 7310 | gcagaaUfaUfaUfuugcagcasusu | 7350 | usGfscUfgCfaAfaUfaUfaUfuCfuGfcsusu |
| siRNA 7311 | 7311 | uauuuGfcAfGfcuauugacuasusu | 7351 | usAfsgUfcAfaUfaGfcUfgCfaAfaUfasusu |
| siRNA 7312 | 7312 | agcuAfuuGfAfcuuuguaauasusu | 7352 | usAfsuUfaCfaAfaGfuCfaAfuAfgCfususu |

TABLE 5
Alternatively Modified Screening Set (Subset H)

| | SEQ ID | Sense strand sequence | SEQ ID | Antisense strand sequence |
|---|---|---|---|---|
| siRNA Name | NO: | (5′-3′) | NO: | (5′-3′) |
| siRNA 7353 | 7353 | aaacuCfaaCfuCfcaucaagasusu | 7313 | usCfsuUfgAfuGfgAfgUfuGfaGfuUfususu |
| siRNA 7354 | 7354 | aaacuCfaaCfUfccaucaagasusu | 7313 | usCfsuUfgAfuGfgAfgUfuGfaGfuUfususu |
| siRNA 7355 | 7355 | aaacUfcaaCfuCfcaucaagasusu | 7313 | usCfsuUfgAfuGfgAfgUfuGfaGfuUfususu |
| siRNA 7356 | 7356 | aaacUfcaaCfUfccaucaagasusu | 7313 | usCfsuUfgAfuGfgAfgUfuGfaGfuUfususu |
| siRNA 7357 | 7357 | aaacUfCfaaCfuccaucaagasusu | 7313 | usCfsuUfgAfuGfgAfgUfuGfaGfuUfususu |
| siRNA 7358 | 7358 | aaacUfCfaaCfuCfcaucaagasusu | 7313 | usCfsuUfgAfuGfgAfgUfuGfaGfuUfususu |
| siRNA 7359 | 7359 | acucaaCfuCfCfaucaagucasusu | 7314 | usGfsaCfuUfgAfuGfgAfgUfuGfaGfususu |
| siRNA 7360 | 7360 | caacucCfaUfCfaaguccucasusu | 7315 | usGfsaGfgAfcUfuGfaUfgGfaGfuUfgsusu |
| siRNA 7361 | 7361 | caacuCfcaUfCfaaguccucasusu | 7315 | usGfsaGfgAfcUfuGfaUfgGfaGfuUfgsusu |
| siRNA 7362 | 7362 | caacuCfCfaUfcaaguccucasusu | 7315 | usGfsaGfgAfcUfuGfaUfgGfaGfuUfgsusu |
| siRNA 7363 | 7363 | caacuCfCfaUfCfaaguccucasusu | 7315 | usGfsaGfgAfcUfuGfaUfgGfaGfuUfgsusu |
| siRNA 7364 | 7364 | caacUfccaUfCfaaguccucasusu | 7315 | usGfsaGfgAfcUfuGfaUfgGfaGfuUfgsusu |
| siRNA 7365 | 7365 | caacUfcCfaUfcaaguccucasusu | 7315 | usGfsaGfgAfcUfuGfaUfgGfaGfuUfgsusu |
| siRNA 7366 | 7366 | caacUfcCfaUfCfaaguccucasusu | 7315 | usGfsaGfgAfcUfuGfaUfgGfaGfuUfgsusu |
| siRNA 7367 | 7367 | caacUfCfcaUfcaaguccucasusu | 7315 | usGfsaGfgAfcUfuGfaUfgGfaGfuUfgsusu |
| siRNA 7368 | 7368 | aguaagaAfGfgGfcaaaaacasusu | 7316 | usGfsuUfuUfuGfcCfcUfuCfuUfaCfususu |
| siRNA 7369 | 7369 | aguaagaAfGfGfGfcaaaaacasusu | 7317 | usGfsuUfuUfuGfcCfcUfuCfuUfaCfususu |
| siRNA 7370 | 7370 | aguaagAfaGfgGfcaaaaacasusu | 7318 | usGfsuUfuUfuGfcCfcUfuCfuUfaCfususu |
| siRNA 7371 | 7371 | aguaagAfaGfGfgcaaaaacasusu | 7319 | usGfsuUfuUfuGfcCfcUfuCfuUfaCfususu |
| siRNA 7372 | 7372 | aguaagAfAfGfGfgcaaaaacasusu | 7320 | usGfsuUfuUfuGfcCfcUfuCfuUfaCfususu |
| siRNA 7373 | 7373 | aguaagAfAfGfGfGfcaaaaacasusu | 7321 | usGfsuUfuUfuGfcCfcUfuCfuUfaCfususu |
| siRNA 7374 | 7374 | aguaaGfaaGfgGfcaaaaacasusu | 7322 | usGfsuUfuUfuGfcCfcUfuCfuUfaCfususu |
| siRNA 7375 | 7375 | aguaaGfaaGfGfgcaaaaacasusu | 7323 | usGfsuUfuUfuGfcCfcUfuCfuUfaCfususu |
| siRNA 7376 | 7376 | aguaaGfaAfGfggcaaaaacasusu | 7324 | usGfsuUfuUfuGfcCfcUfuCfuUfaCfususu |
| siRNA 7377 | 7377 | aguaaGfaAfGfgGfcaaaaacasusu | 7325 | usGfsuUfuUfuGfcCfcUfuCfuUfaCfususu |
| siRNA 7378 | 7378 | aguaaGfaAfGfGfGfcaaaaacasusu | 7326 | usGfsuUfuUfuGfcCfcUfuCfuUfaCfususu |
| siRNA 7379 | 7379 | aguaaGfAfaGfggcaaaaacasusu | 7327 | usGfsuUfuUfuGfcCfcUfuCfuUfaCfususu |
| siRNA 7380 | 7380 | aguaaGfAfaGfgGfcaaaaacasusu | 7328 | usGfsuUfuUfuGfcCfcUfuCfuUfaCfususu |
| siRNA 7381 | 7381 | aguaaGfAfaGfGfgcaaaaacasusu | 7329 | usGfsuUfuUfuGfcCfcUfuCfuUfaCfususu |
| siRNA 7382 | 7382 | aguaaGfAfAfGfgGfcaaaaacasusu | 7330 | usGfsuUfuUfuGfcCfcUfuCfuUfaCfususu |
| siRNA 7383 | 7383 | aguaaGfAfAfGfGfgcaaaaacasusu | 7331 | usGfsuUfuUfuGfcCfcUfuCfuUfaCfususu |
| siRNA 7384 | 7384 | aguaAfgaaGfgGfcaaaaacasusu | 7332 | usGfsuUfuUfuGfcCfcUfuCfuUfaCfususu |
| siRNA 7385 | 7385 | aguaAfgaaGfGfgcaaaaacasusu | 7333 | usGfsuUfuUfuGfcCfcUfuCfuUfaCfususu |
| siRNA 7386 | 7386 | aguaAfgaAfGfggcaaaaacasusu | 7334 | usGfsuUfuUfuGfcCfcUfuCfuUfaCfususu |
| siRNA 7387 | 7387 | aguaAfgaAfGfgGfcaaaaacasusu | 7335 | usGfsuUfuUfuGfcCfcUfuCfuUfaCfususu |
| siRNA 7388 | 7388 | aguaAfgaAfGfGfGfcaaaaacasusu | 7336 | usGfsuUfuUfuGfcCfcUfuCfuUfaCfususu |
| siRNA 7389 | 7389 | aguaAfgAfaGfggcaaaaacasusu | 7337 | usGfsuUfuUfuGfcCfcUfuCfuUfaCfususu |
| siRNA 7390 | 7390 | aguaAfgAfaGfgGfcaaaaacasusu | 7338 | usGfsuUfuUfuGfcCfcUfuCfuUfaCfususu |
| siRNA 7391 | 7391 | aguaAfgAfaGfGfgcaaaaacasusu | 7339 | usGfsuUfuUfuGfcCfcUfuCfuUfaCfususu |
| siRNA 7392 | 7392 | aguaAfgAfAfGfGfgcaaaaacasusu | 7340 | usGfsuUfuUfuGfcCfcUfuCfuUfaCfususu |
| siRNA 7393 | 7393 | aguaAfGfaaGfggcaaaaacasusu | 7341 | usGfsuUfuUfuGfcCfcUfuCfuUfaCfususu |
| siRNA 7394 | 7394 | aguaAfGfaaGfgGfcaaaaacasusu | 7342 | usGfsuUfuUfuGfcCfcUfuCfuUfaCfususu |
| siRNA 7395 | 7395 | aguaAfGfaaGfGfgcaaaaacasusu | 7343 | usGfsuUfuUfuGfcCfcUfuCfuUfaCfususu |
| siRNA 7396 | 7396 | aguaAfGfaAfGfggcaaaaacasusu | 7344 | usGfsuUfuUfuGfcCfcUfuCfuUfaCfususu |
| siRNA 7397 | 7397 | aguaAfGfaAfGfgGfcaaaaacasusu | 7345 | usGfsuUfuUfuGfcCfcUfuCfuUfaCfususu |
| siRNA 7398 | 7398 | aguaAfGfAfAfGfggcaaaaacasusu | 7346 | usGfsuUfuUfuGfcCfcUfuCfuUfaCfususu |
| siRNA 7399 | 7399 | cccuuGfuaGfcAfgugauaaasusu | 7318 | usUfsuAfuCfaCfuGfcUfaCfaAfgGfgsusu |
| siRNA 7400 | 7400 | cccuuGfuAfGfcagugauaaasusu | 7318 | usUfsuAfuCfaCfuGfcUfaCfaAfgGfgsusu |
| siRNA 7401 | 7401 | cccuuGfuAfGfcAfgugauaaasusu | 7318 | usUfsuAfuCfaCfuGfcUfaCfaAfgGfgsusu |
| siRNA 7402 | 7402 | ccuuGfuAfGfdCagugauaagasusu | 7319 | usCfsuUfaUfcAfcUfgCfuAfcAfaGfgsusu |
| siRNA 7403 | 7403 | cgcuGfcAfAfdUaauggcaucasusu | 7320 | usGfsaUfgCfcAfuUfaUfuGfcAfgCfgsusu |
| siRNA 7404 | 7404 | gucauUfacUfCfaaaccaugasusu | 7321 | usCfsaUfgGfuUfuGfaGfuAfaUfgAfcsusu |
| siRNA 7405 | 7405 | gucauUfaCfUfcaaaccaugasusu | 7321 | usCfsaUfgGfuUfuGfaGfuAfaUfgAfcsusu |
| siRNA 7406 | 7406 | gucaUfuacUfCfaaaccaugasusu | 7321 | usCfsaUfgGfuUfuGfaGfuAfaUfgAfcsusu |
| siRNA 7407 | 7407 | gucaUfuaCfUfcaaaccaugasusu | 7321 | usCfsaUfgGfuUfuGfaGfuAfaUfgAfcsusu |
| siRNA 7408 | 7408 | gucaUfUfacUfcaaaccaugasusu | 7321 | usCfsaUfgGfuUfuGfaGfuAfaUfgAfcsusu |
| siRNA 7409 | 7409 | gucaUfUfacUfCfaaaccaugasusu | 7321 | usCfsaUfgGfuUfuGfaGfuAfaUfgAfcsusu |
| siRNA 7410 | 7410 | cauuAfcucAfaAfccaugacasusu | 7322 | usGfsuCfaUfgGfuUfuGfaGfuAfaUfgsusu |
| siRNA 7411 | 7411 | ggauggcAfGfaAfucuaggaasusu | 7323 | usUfscCfuAfgAfuUfcUfgCfcAfuCfcsusu |
| siRNA 7412 | 7412 | ggauggcAfGfAfAfucuaggaasusu | 7324 | usUfscCfuAfgAfuUfcUfgCfcAfuCfcsusu |
| siRNA 7413 | 7413 | ggaugGfcaGfaAfucuaggaasusu | 7325 | usUfscCfuAfgAfuUfcUfgCfcAfuCfcsusu |
| siRNA 7414 | 7414 | ggaugGfcaGfAfaucuaggaasusu | 7326 | usUfscCfuAfgAfuUfcUfgCfcAfuCfcsusu |
| siRNA 7415 | 7415 | ggaugGfcAfGfaaucuaggaasusu | 7327 | usUfscCfuAfgAfuUfcUfgCfcAfuCfcsusu |
| siRNA 7416 | 7416 | ggaugGfcAfGfaAfucuaggaasusu | 7328 | usUfscCfuAfgAfuUfcUfgCfcAfuCfcsusu |
| siRNA 7417 | 7417 | ggaugGfcAfGfAfAfucuaggaasusu | 7329 | usUfscCfuAfgAfuUfcUfgCfcAfuCfcsusu |
| siRNA 7418 | 7418 | ggauGfgcaGfaAfucuaggaasusu | 7330 | usUfscCfuAfgAfuUfcUfgCfcAfuCfcsusu |
| siRNA 7419 | 7419 | ggauGfgcaGfAfaucuaggaasusu | 7331 | usUfscCfuAfgAfuUfcUfgCfcAfuCfcsusu |
| siRNA 7420 | 7420 | ggauGfgcAfGfaAfucuaggaasusu | 7332 | usUfscCfuAfgAfuUfcUfgCfcAfuCfcsusu |
| siRNA 7421 | 7421 | ggauGfgcAfGfAfAfucuaggaasusu | 7333 | usUfscCfuAfgAfuUfcUfgCfcAfuCfcsusu |
| siRNA 7422 | 7422 | ggauGfGfcaGfaaucuaggaasusu | 7334 | usUfscCfuAfgAfuUfcUfgCfcAfuCfcsusu |
| siRNA 7423 | 7423 | ggauGfGfcaGfaAfucuaggaasusu | 7335 | usUfscCfuAfgAfuUfcUfgCfcAfuCfcsusu |
| siRNA 7424 | 7424 | ggauGfGfcaGfAfaucuaggaasusu | 7336 | usUfscCfuAfgAfuUfcUfgCfcAfuCfcsusu |
| siRNA 7425 | 7425 | ggauGfGfcAfGfaaucuaggaasusu | 7337 | usUfscCfuAfgAfuUfcUfgCfcAfuCfcsusu |
| siRNA 7426 | 7426 | ggauGfGfcAfGfaAfucuaggaasusu | 7338 | usUfscCfuAfgAfuUfcUfgCfcAfuCfcsusu |
| siRNA 7427 | 7427 | ucuaggAfaGfAfccacacacasusu | 7324 | usGfsuGfuGfuGfgUfcUfuCfcUfaGfasusu |
| siRNA 7428 | 7428 | ucuaggAfAfGfAfccacacacasusu | 7324 | usGfsuGfuGfuGfgUfcUfuCfcUfaGfasusu |
| siRNA 7429 | 7429 | ucuagGfaaGfAfccacacacasusu | 7324 | usGfsuGfuGfuGfgUfcUfuCfcUfaGfasusu |
| siRNA 7430 | 7430 | ucuagGfaAfGfaccacacacasusu | 7324 | usGfsuGfuGfuGfgUfcUfuCfcUfaGfasusu |
| siRNA 7431 | 7431 | ucuagGfAfaGfaccacacacasusu | 7324 | usGfsuGfuGfuGfgUfcUfuCfcUfaGfasusu |
| siRNA 7432 | 7432 | ucuagGfAfaGfAfccacacacasusu | 7324 | usGfsuGfuGfuGfgUfcUfuCfcUfaGfasusu |
| siRNA 7433 | 7433 | ucuagGfAfAfGfaccacacacasusu | 7324 | usGfsuGfuGfuGfgUfcUfuCfcUfaGfasusu |
| siRNA 7434 | 7434 | ucuaGfgaaGfAfccacacacasusu | 7324 | usGfsuGfuGfuGfgUfcUfuCfcUfaGfasusu |
| siRNA 7435 | 7435 | ucuaGfgaAfGfaccacacacasusu | 7324 | usGfsuGfuGfuGfgUfcUfuCfcUfaGfasusu |
| siRNA 7436 | 7436 | ucuaGfgAfaGfaccacacacasusu | 7324 | usGfsuGfuGfuGfgUfcUfuCfcUfaGfasusu |
| siRNA 7437 | 7437 | ucuaGfgAfaGfAfccacacacasusu | 7324 | usGfsuGfuGfuGfgUfcUfuCfcUfaGfasusu |
| siRNA 7438 | 7438 | ucuaGfgAfAfGfAfccacacacasusu | 7324 | usGfsuGfuGfuGfgUfcUfuCfcUfaGfasusu |
| siRNA 7439 | 7439 | ucuaGfGfaaGfaccacacacasusu | 7324 | usGfsuGfuGfuGfgUfcUfuCfcUfaGfasusu |
| siRNA 7440 | 7440 | ucuaGfGfaaGfAfccacacacasusu | 7324 | usGfsuGfuGfuGfgUfcUfuCfcUfaGfasusu |
| siRNA 7441 | 7441 | ucuaGfGfaAfGfaccacacacasusu | 7324 | usGfsuGfuGfuGfgUfcUfuCfcUfaGfasusu |
| siRNA 7442 | 7442 | ucuaGfGfAfAfGfaccacacacasusu | 7324 | usGfsuGfuGfuGfgUfcUfuCfcUfaGfasusu |
| siRNA 7443 | 7443 | ggaagAfccAfcAfcacuaagasusu | 7325 | usCfsuUfaGfuGfuGfuGfgUfcUfuCfcsusu |
| siRNA 7444 | 7444 | ggaaGfaccAfcAfcacuaagasusu | 7325 | usCfsuUfaGfuGfuGfuGfgUfcUfuCfcsusu |
| siRNA 7445 | 7445 | ggaaGfAfccAfcacacuaagasusu | 7325 | usCfsuUfaGfuGfuGfuGfgUfcUfuCfcsusu |
| siRNA 7446 | 7446 | gaagacCfaCfaCfacuaagaasusu | 7326 | usUfscUfuAfgUfgUfgUfgGfuCfuUfcsusu |
| siRNA 7447 | 7447 | gaagaCfcaCfaCfacuaagaasusu | 7326 | usUfscUfuAfgUfgUfgUfgGfuCfuUfcsusu |
| siRNA 7448 | 1448 | gaagaCfCfaCfacacuaagaasusu | 7326 | usUfscUfuAfgUfgUfgUfgGfuCfuUfcsusu |
| siRNA 7449 | 7449 | agaccaCfaCfaCfuaagaugasusu | 7327 | usCfsaUfcUfuAfgUfgUfgUfgGfuCfususu |
| siRNA 7450 | 7450 | agacCfacaCfaCfuaagaugasusu | 7328 | usCfsaUfcUfuAfgUfgUfgUfgGfuCfususu |
| siRNA 7451 | 7451 | agacCfaCfaCfacuaagaugasusu | 7329 | usCfsaUfcUfuAfgUfgUfgUfgGfuCfususu |
| siRNA 7452 | 7452 | accacaCfaCfUfaagaugucasusu | 7328 | usGfsaCfaUfcUfuAfgUfgUfgUfgGfususu |
| siRNA 7453 | 7453 | accaCfacaCfUfaagaugucasusu | 7328 | usGfsaCfaUfcUfuAfgUfgUfgUfgGfususu |
| siRNA 7454 | 7454 | accaCfaCfaCfuaagaugucasusu | 7328 | usGfsaCfaUfcUfuAfgUfgUfgUfgGfususu |
| siRNA 7455 | 7455 | cacacuAfaGfAfugucacauasusu | 7329 | usAfsuGfuGfaCfaUfcUfuAfgUfgUfgsusu |
| siRNA 7456 | 7456 | cacuAfaGfAfdUgucacauauasusu | 7330 | usAfsuAfuGfuGfaCfaUfcUfuAfgUfgsusu |
| siRNA 7457 | 7457 | augucaCfaUfaUfaaaagggasusu | 7331 | usCfscCfuUfuUfaUfaUfgUfgAfcAfususu |
| siRNA 7458 | 7458 | auguCfacaUfaUfaaaagggasusu | 7331 | usCfscCfuUfuUfaUfaUfgUfgAfcAfususu |
| siRNA 7459 | 7459 | auguCfaCfaUfauaaaagggasusu | 7331 | usCfscCfuUfuUfaUfaUfgUfgAfcAfususu |
| siRNA 7460 | 7460 | ugaagggUfUfUfUfgcugugcasusu | 7332 | usGfscAfcAfgCfaAfaAfcCfcUfuCfasusu |
| siRNA 7461 | 7461 | cuggaccAfAfaAfucugcaaasusu | 7332 | usGfscAfcAfgCfaAfaAfcCfcUfuCfasusu |
| siRNA 7462 | 7462 | cuggaccAfAfAfAfucugcaaasusu | 7332 | usGfscAfcAfgCfaAfaAfcCfcUfuCfasusu |
| siRNA 7463 | 7463 | cuggAfccaAfaAfucugcaaasusu | 7332 | usGfscAfcAfgCfaAfaAfcCfcUfuCfasusu |
| siRNA 7464 | 7464 | cuggAfccaAfAfaucugcaaasusu | 7332 | usGfscAfcAfgCfaAfaAfcCfcUfuCfasusu |
| siRNA 7465 | 7465 | cuggAfccAfAfaaucugcaaasusu | 7332 | usGfscAfcAfgCfaAfaAfcCfcUfuCfasusu |
| siRNA 7466 | 7466 | cuggAfccAfAfAfAfucugcaaasusu | 7332 | usGfscAfcAfgCfaAfaAfcCfcUfuCfasusu |
| siRNA 7467 | 7467 | uggaccAfaAfAfucugcaaaasusu | 7333 | usUfsuGfcAfgAfuUfuUfgGfuCfcAfgsusu |
| siRNA 7468 | 7468 | aaucuGfcaAfAfccagugcuasusu | 7335 | usAfscUfgGfuUfuGfcAfgAfuUfuUfgsusu |
| siRNA 7469 | 7469 | guauggaAfAfgAfugccaccasusu | 7336 | usAfsgCfaCfuGfgUfuUfgCfaGfaUfususu |
| siRNA 7470 | 7470 | guauggaAfAfGfAfugccaccasusu | 7336 | usAfsgCfaCfuGfgUfuUfgCfaGfaUfususu |
| siRNA 7471 | 7471 | guauggAfaAfGfaugccaccasusu | 7336 | usAfsgCfaCfuGfgUfuUfgCfaGfaUfususu |
| siRNA 7472 | 7472 | guauggAfAfAfGfaugccaccasusu | 7336 | usAfsgCfaCfuGfgUfuUfgCfaGfaUfususu |
| siRNA 7473 | 7473 | guauggAfAfAfGfAfugccaccasusu | 7336 | usAfsgCfaCfuGfgUfuUfgCfaGfaUfususu |
| siRNA 7474 | 7474 | guaugGfaaAfgAfugccaccasusu | 7336 | usAfsgCfaCfuGfgUfuUfgCfaGfaUfususu |
| siRNA 7475 | 7475 | guaugGfaaAfGfaugccaccasusu | 7336 | usAfsgCfaCfuGfgUfuUfgCfaGfaUfususu |
| siRNA 7476 | 7476 | guaugGfaAfAfgaugccaccasusu | 7336 | usAfsgCfaCfuGfgUfuUfgCfaGfaUfususu |
| siRNA 7477 | 7477 | guaugGfaAfAfgAfugccaccasusu | 7336 | usAfsgCfaCfuGfgUfuUfgCfaGfaUfususu |
| siRNA 7478 | 7478 | guaugGfaAfAfGfAfugccaccasusu | 7336 | usAfsgCfaCfuGfgUfuUfgCfaGfaUfususu |
| siRNA 7479 | 7479 | guaugGfAfaAfgaugccaccasusu | 7336 | usAfsgCfaCfuGfgUfuUfgCfaGfaUfususu |
| siRNA 7480 | 7480 | guaugGfAfaAfgAfugccaccasusu | 7336 | usAfsgCfaCfuGfgUfuUfgCfaGfaUfususu |
| siRNA 7481 | 7481 | guaugGfAfaAfGfaugccaccasusu | 7336 | usAfsgCfaCfuGfgUfuUfgCfaGfaUfususu |
| siRNA 7482 | 7482 | guaugGfAfAfAfgaugccaccasusu | 7336 | usAfsgCfaCfuGfgUfuUfgCfaGfaUfususu |
| siRNA 7483 | 7483 | guaugGfAfAfAfgAfugccaccasusu | 7336 | usAfsgCfaCfuGfgUfuUfgCfaGfaUfususu |
| siRNA 7484 | 7484 | guaugGfAfAfAfGfaugccaccasusu | 7336 | usAfsgCfaCfuGfgUfuUfgCfaGfaUfususu |
| siRNA 7485 | 7485 | guauGfgaaAfgAfugccaccasusu | 7336 | usAfsgCfaCfuGfgUfuUfgCfaGfaUfususu |
| siRNA 7486 | 7486 | guauGfgaaAfGfaugccaccasusu | 7336 | usAfsgCfaCfuGfgUfuUfgCfaGfaUfususu |
| siRNA 7487 | 7487 | guauGfgaAfAfgaugccaccasusu | 7336 | usAfsgCfaCfuGfgUfuUfgCfaGfaUfususu |
| siRNA 7488 | 7488 | guauGfgaAfAfgAfugccaccasusu | 7336 | usAfsgCfaCfuGfgUfuUfgCfaGfaUfususu |
| siRNA 7489 | 7489 | guauGfgaAfAfGfAfugccaccasusu | 7336 | usAfsgCfaCfuGfgUfuUfgCfaGfaUfususu |
| siRNA 7490 | 7490 | guauGfgAfaAfgaugccaccasusu | 7336 | usAfsgCfaCfuGfgUfuUfgCfaGfaUfususu |
| siRNA 7491 | 7491 | guauGfgAfaAfgAfugccaccasusu | 7336 | usAfsgCfaCfuGfgUfuUfgCfaGfaUfususu |
| siRNA 7492 | 7492 | guauGfgAfaAfGfaugccaccasusu | 7336 | usAfsgCfaCfuGfgUfuUfgCfaGfaUfususu |
| siRNA 7493 | 7493 | guauGfgAfAfAfGfaugccaccasusu | 7336 | usAfsgCfaCfuGfgUfuUfgCfaGfaUfususu |
| siRNA 7494 | 7494 | guauGfGfaaAfgaugccaccasusu | 7336 | usAfsgCfaCfuGfgUfuUfgCfaGfaUfususu |
| siRNA 7495 | 7495 | guauGfGfaaAfgAfugccaccasusu | 7336 | usAfsgCfaCfuGfgUfuUfgCfaGfaUfususu |
| siRNA 7496 | 7496 | guauGfGfaaAfGfaugccaccasusu | 7336 | usAfsgCfaCfuGfgUfuUfgCfaGfaUfususu |
| siRNA 7497 | 7497 | guauGfGfaAfAfgaugccaccasusu | 7336 | usAfsgCfaCfuGfgUfuUfgCfaGfaUfususu |
| siRNA 7498 | 7498 | guauGfGfaAfAfgAfugccaccasusu | 7336 | usAfsgCfaCfuGfgUfuUfgCfaGfaUfususu |
| siRNA 7499 | 7499 | guauGfGfAfAfAfgaugccaccasusu | 7336 | usAfsgCfaCfuGfgUfuUfgCfaGfaUfususu |
| siRNA 7500 | 7500 | uggaAfaGfAfdUgccaccuacasusu | 7338 | usGfsuAfgGfuGfgCfaUfcUfuUfcCfasusu |
| siRNA 7501 | 7501 | uaaugcaUfUfaUfagcauggasusu | 7339 | usCfscAfuGfcUfaUfaAfuGfcAfuUfasusu |
| siRNA 7502 | 7502 | uaaugCfauUfaUfagcauggasusu | 7339 | usCfscAfuGfcUfaUfaAfuGfcAfuUfasusu |
| siRNA 7503 | 7503 | uaaugCfaUfUfauagcauggasusu | 7339 | usCfscAfuGfcUfaUfaAfuGfcAfuUfasusu |
| siRNA 7504 | 7504 | acacAfgAfGfdCagaauuuucasusu | 7340 | usGfsaAfaAfuUfcUfgCfuCfuGfuGfususu |
| siRNA 7505 | 7505 | ggcaacAfcAfuAfgaucauaasusu | 7342 | usUfsaUfgAfuCfuAfuGfuGfuUfgCfcsusu |
| siRNA 7506 | 7506 | ggcaAfcacAfuAfgaucauaasusu | 7342 | usUfsaUfgAfuCfuAfuGfuGfuUfgCfcsusu |
| siRNA 7507 | 7507 | ggcaAfcAfcAfuAfgaucauaasusu | 7342 | usUfsaUfgAfuCfuAfuGfuGfuUfgCfcsusu |
| siRNA 7508 | 7508 | uauuuucUfUfaUfagagauaasusu | 7345 | usUfsaUfcUfcUfaUfaAfgAfaAfaUfasusu |
| siRNA 7509 | 7509 | uauuuuCfuUfaUfagagauaasusu | 7345 | usUfsaUfcUfcUfaUfaAfgAfaAfaUfasusu |
| siRNA 7510 | 7510 | uauuuUfcuUfaUfagagauaasusu | 7345 | usUfsaUfcUfcUfaUfaAfgAfaAfaUfasusu |
| siRNA 7511 | 7511 | uauuuUfcUfUfauagagauaasusu | 7345 | usUfsaUfcUfcUfaUfaAfgAfaAfaUfasusu |
| siRNA 7512 | 7512 | uauuuUfcUfUfaUfagagauaasusu | 7345 | usUfsaUfcUfcUfaUfaAfgAfaAfaUfasusu |
| siRNA 7513 | 7513 | uauuuUfCfuUfauagagauaasusu | 7345 | usUfsaUfcUfcUfaUfaAfgAfaAfaUfasusu |
| siRNA 7514 | 7514 | uauuuUfCfUfUfauagagauaasusu | 7345 | usUfsaUfcUfcUfaUfaAfgAfaAfaUfasusu |
| siRNA 7515 | 7515 | uauuuUfCfUfUfaUfagagauaasusu | 7345 | usUfsaUfcUfcUfaUfaAfgAfaAfaUfasusu |
| siRNA 7516 | 7516 | uauuUfucuUfaUfagagauaasusu | 7345 | usUfsaUfcUfcUfaUfaAfgAfaAfaUfasusu |
| siRNA 7517 | 7517 | uauuUfucUfUfauagagauaasusu | 7345 | usUfsaUfcUfcUfaUfaAfgAfaAfaUfasusu |
| siRNA 7518 | 7518 | uauuUfucUfUfaUfagagauaasusu | 7345 | usUfsaUfcUfcUfaUfaAfgAfaAfaUfasusu |
| siRNA 7519 | 7519 | uauuUfuCfuUfauagagauaasusu | 7345 | usUfsaUfcUfcUfaUfaAfgAfaAfaUfasusu |
| siRNA 7520 | 7520 | uauuUfuCfuUfaUfagagauaasusu | 7345 | usUfsaUfcUfcUfaUfaAfgAfaAfaUfasusu |
| siRNA 7521 | 7521 | uauuUfUfcuUfauagagauaasusu | 7345 | usUfsaUfcUfcUfaUfaAfgAfaAfaUfasusu |
| siRNA 7522 | 7522 | uauuUfUfcuUfaUfagagauaasusu | 7345 | usUfsaUfcUfcUfaUfaAfgAfaAfaUfasusu |
| siRNA 7523 | 7523 | uauuUfUfcUfUfauagagauaasusu | 7345 | usUfsaUfcUfcUfaUfaAfgAfaAfaUfasusu |
| siRNA 7524 | 7524 | uauuUfUfcUfUfaUfagagauaasusu | 7345 | usUfsaUfcUfcUfaUfaAfgAfaAfaUfasusu |
| siRNA 7525 | 7525 | uauuUfUfCfUfUfauagagauaasusu | 7345 | usUfsaUfcUfcUfaUfaAfgAfaAfaUfasusu |
| siRNA 7526 | 7526 | ucuuacaGfAfaAfgcuuuguasusu | 7346 | usAfscAfaAfgCfuUfuCfuGfuAfaGfasusu |
| siRNA 7527 | 7527 | ucuuacaGfAfAfAfgcuuuguasusu | 7347 | usAfscAfaAfgCfuUfuCfuGfuAfaGfasusu |
| siRNA 7528 | 7528 | ucuuacAfgAfaAfgcuuuguasusu | 7348 | usAfscAfaAfgCfuUfuCfuGfuAfaGfasusu |
| siRNA 7529 | 7529 | ucuuacAfgAfAfagcuuuguasusu | 7349 | usAfscAfaAfgCfuUfuCfuGfuAfaGfasusu |
| siRNA 7530 | 7530 | ucuuacAfGfAfAfagcuuuguasusu | 7350 | usAfscAfaAfgCfuUfuCfuGfuAfaGfasusu |
| siRNA 7531 | 7531 | ucuuacAfGfAfAfAfgcuuuguasusu | 7351 | usAfscAfaAfgCfuUfuCfuGfuAfaGfasusu |
| siRNA 7532 | 7532 | ucuuAfcagAfaAfgcuuuguasusu | 7352 | usAfscAfaAfgCfuUfuCfuGfuAfaGfasusu |
| siRNA 7533 | 7533 | ucuuAfcagAfAfagcuuuguasusu | 7353 | usAfscAfaAfgCfuUfuCfuGfuAfaGfasusu |
| siRNA 7534 | 7534 | ucuuAfcaGfAfaagcuuuguasusu | 7354 | usAfscAfaAfgCfuUfuCfuGfuAfaGfasusu |
| siRNA 7535 | 7535 | ucuuAfcaGfAfaAfgcuuuguasusu | 7355 | usAfscAfaAfgCfuUfuCfuGfuAfaGfasusu |
| siRNA 7536 | 7536 | ucuuAfcaGfAfAfAfgcuuuguasusu | 7356 | usAfscAfaAfgCfuUfuCfuGfuAfaGfasusu |
| siRNA 7537 | 7537 | ucuuAfcAfgAfaAfgcuuuguasusu | 7357 | usAfscAfaAfgCfuUfuCfuGfuAfaGfasusu |
| siRNA 7538 | 7538 | ucuuAfcAfgAfAfagcuuuguasusu | 7358 | usAfscAfaAfgCfuUfuCfuGfuAfaGfasusu |
| siRNA 7539 | 7539 | ucuuAfcAfGfAfAfagcuuuguasusu | 7359 | usAfscAfaAfgCfuUfuCfuGfuAfaGfasusu |
| siRNA 7540 | 7540 | uuacagAfaAfGfcuuuguagasusu | 7347 | usCfsuAfcAfaAfgCfuUfuCfuGfuAfasusu |
| siRNA 7541 | 7541 | uuacagAfAfAfGfcuuuguagasusu | 7347 | usCfsuAfcAfaAfgCfuUfuCfuGfuAfasusu |
| siRNA 7542 | 7542 | uuacaGfaaAfGfcuuuguagasusu | 7347 | usCfsuAfcAfaAfgCfuUfuCfuGfuAfasusu |
| siRNA 7543 | 7543 | uuacaGfaAfAfgcuuuguagasusu | 7347 | usCfsuAfcAfaAfgCfuUfuCfuGfuAfasusu |
| siRNA 7544 | 7544 | uuacaGfAfaAfgcuuuguagasusu | 7347 | usCfsuAfcAfaAfgCfuUfuCfuGfuAfasusu |
| siRNA 7545 | 7545 | uuacaGfAfaAfGfcuuuguagasusu | 7347 | usCfsuAfcAfaAfgCfuUfuCfuGfuAfasusu |
| siRNA 7546 | 7546 | uuacaGfAfAfAfgcuuuguagasusu | 7347 | usCfsuAfcAfaAfgCfuUfuCfuGfuAfasusu |
| siRNA 7547 | 7547 | uuacaGfAfAfAfGfcuuuguagasusu | 7347 | usCfsuAfcAfaAfgCfuUfuCfuGfuAfasusu |
| siRNA 7548 | 7548 | uuacAfgaaAfGfcuuuguagasusu | 7347 | usCfsuAfcAfaAfgCfuUfuCfuGfuAfasusu |
| siRNA 7549 | 7549 | uuacAfgaAfAfgcuuuguagasusu | 7347 | usCfsuAfcAfaAfgCfuUfuCfuGfuAfasusu |
| siRNA 7550 | 7550 | uuacAfgAfaAfgcuuuguagasusu | 7347 | usCfsuAfcAfaAfgCfuUfuCfuGfuAfasusu |
| siRNA 7551 | 7551 | uuacAfgAfAfAfGfcuuuguagasusu | 7347 | usCfsuAfcAfaAfgCfuUfuCfuGfuAfasusu |
| siRNA 7552 | 7552 | uuacAfGfaaAfgcuuuguagasusu | 7347 | usCfsuAfcAfaAfgCfuUfuCfuGfuAfasusu |
| siRNA 7553 | 7553 | uuacAfGfaaAfGfcuuuguagasusu | 7347 | usCfsuAfcAfaAfgCfuUfuCfuGfuAfasusu |
| siRNA 7554 | 7554 | uuacAfGfaAfAfgcuuuguagasusu | 7347 | usCfsuAfcAfaAfgCfuUfuCfuGfuAfasusu |
| siRNA 7555 | 7555 | uuacAfGfAfAfAfgcuuuguagasusu | 7347 | usCfsuAfcAfaAfgCfuUfuCfuGfuAfasusu |
| siRNA 7556 | 7556 | gcuuuguAfGfcAfgaauauaasusu | 7349 | usUfsaUfaUfuCfuGfcUfaCfaAfaGfcsusu |
| siRNA 7557 | 7557 | gcuuuGfuAfGfcagaauauaasusu | 7349 | usUfsaUfaUfuCfuGfcUfaCfaAfaGfcsusu |
| siRNA 7558 | 7558 | gcuuuGfuAfGfcAfgaauauaasusu | 7349 | usUfsaUfaUfuCfuGfcUfaCfaAfaGfcsusu |

[0248] Any siRNA among any of subsets A-H may comprise any modification pattern described herein. If a sequence has a different number of nucleotides in length than a modification pattern, the modification pattern may still be used with the appropriate number of additional nucleotides added 5′ or 3′ to match the number of nucleotides in the modification pattern. For example, if a sense or antisense strand of the siRNA among any of subsets A-H comprises 19 nucleotides, and a modification pattern comprises 21 nucleotides, UU may be added onto the 5′ end of the sense or antisense strand.

### Example 3: In Vivo Delivery of siRNA in C57 Mice

[0249] A published model of hair growth where application of dexamethasone was used to assess the ability of DKK2 mRNA reduction to prevent catagen phase (Paus, R; Handjiski, B; Czarnetzki, B.; Eichmüller, S A Murine Model for Inducing and Manipulating Hair Follicle Regression (Catagen): Effects of Dexamethasone and Cyclosporin A Journal of Investigative Dermatology 1994, 103, 143-147.) On day 0 of study groups of two groups of four using 59-day-old mice had an area on their back shaved and depilated using hair removal cream containing urea and potassium thioglycolate (Nad's for Men Hair Removal cream). Following hair removal, 30 ug ETD01043 or ETD01551 formulated in 10 ul of 1 part azone: 32 parts propylene glycol was applied to the shaved area. ETD01043 was used as a control and targeted human ANGPTL7, and ETD01551 targeted DKK2. The application of siRNA's was repeated on days, 2, 5 and 7. On day 9 of study, formulations containing 30 ug ETD01043 or ETD01551, and 10 ug dexamethasone acetate formulated in 10 ul of 1 part azone: 32 parts propylene glycol were applied to the shaved areas. The formulations containing dexamethasone and siRNA were repeated on days 10, 11, 12, 13 and 14.

[0250] Pictures of the hair growth area were taken on day 14 of study. The animals treated with ETD01043, which did not target DKK2 mRNA, showed pronounced graying indicative of the catagen phase, while ETD01551, which targeted DKK2, did not show graying (FIG. 2A-2B).

[0251] On day 16 of the study, the animals were euthanized, and skin samples of the siRNA-applied areas were obtained by punch biopsy and placed into RNAlater. Total skin RNA was prepared by homogenizing the tissue in homogenization buffer (Maxwell RSC simplyRNA Tissue Kit) using a Percellys 24 tissue homogenizer (Bertin Instruments) set at 5000 rpm for two 10 second cycles. The homogenate was centrifuged for 10′ at 16,000×g at 4 C and the lower liquid layer was removed to a fresh tube. The sample was centrifuged two additional times, each time removing the lower liquid layer to a fresh tube. Total RNA from the lysate was purified on a Maxwell RSC 48 platform (Promega Corporation) according to the manufacturer's recommendations. Preparation ofcDNA was performed using Quanta uScript cDNA SuperMix (VWR, Catalog #95048-500) according to the manufacturer's instructions. The relative levels of mouse DKK2 mRNA were assessed by RT-qPCR in triplicate on a QuantStudio™ 6 Pro Real-Time PCR System using and the mouse housekeeping gene PPIA (TheroFisher, assaysMm02342430g1). Data were normalized to the level in animals receiving ETD01043, which showed that an average DKK2 knockdown of 87% for the animals treated with DKK2-targeting ETD01551.

[0252] Some example siRNAs are shown in Table 6, where Nf (e.g. Af, Cf, Gf, Tf, or Uf) is a 2′ fluoro-modified nucleoside, n (e.g. a, c, g, t, or u) is a 2′ O-methyl modified nucleoside, and “s” is a phosphorothioate linkage. In addition to ETD01043 and ETD01551, this table includes additional siRNAs that may be tested as described above, or which may be used in a method disclosed herein. The siRNAs in this table may target mouse DKK2.

TABLE 6
siRNAs for in vivo models

| | SEQ | Sense Strand Sequences | SEQ | |
|---|---|---|---|---|
| siRNA | ID | (5′ to 3′), with | ID | Antisense Strand Sequences |
| Name | NO: | Hydrophobic Moieties | NO: | (5′ to 3′) |
| ETD01080 | 7559 | gscsagAfcUfgUfgaauuugugususu | 7579 | asCfsacaAfauucacaGfuCfugcsusu |
| ETD01081 | 7560 | usgsuaCfcAfaAfcaacgcaagasusu | 7580 | usCfsuugCfguuguuuGfgUfacasusu |
| ETD01082 | 7561 | csusccAfaGfaUfgccucauauasusu | 7581 | usAfsuauGfaggcaucUfuGfgagsusu |
| ETD01083 | 7562 | csusgcAfuUfgAfuggguuuugususu | 7582 | asCfsaaaAfcccaucaAfuGfcagsusu |
| ETD01084 | 7563 | CfsusAfuUfaUfuAfaAfaGfaAfaGfcAfsusu | 7583 | usGfscUfuUfcUfuUfuAfaUfaAfuAfgsusu |
| ETD01085 | 7564 | GfsusAfaUfaAfcAfuAfuCfuCfuAfaUfsusu | 7584 | asUfsuAfgAfgAfuAfuGfuUfaUfuAfcsusu |
| ETD01086 | 7565 | UfsasAfuAfaCfaUfaUfcUfcUfaAfuCfsusu | 7585 | usAfsuUfaGfaGfaUfaUfgUfuAfuUfasusu |
| ETD01087 | 7566 | UfsusAfaUfaAfaUfuAfcUfcUfcAfcUfsusu | 7586 | asGfsuGfaGfaGfuAfaUfuUfaUfuAfasusu |
| ETD01088 | 7567 | UfsasUfuUfuCfuGfaAfaCfuAfuUfgAfsusu | 7587 | usCfsaAfuAfgUfuUfcAfgAfaAfaUfasusu |
| ETD01089 | 7568 | UfsusUfcAfcUfaUfuUfuCfuGfaUfuAfsusu | 7588 | usAfsaUfcAfgAfaAfaUfaGfuGfaAfasusu |
| ETD01090 | 7569 | AfsasUfgUfaCfaCfaUfuUfgUfgAfaAfsusu | 7589 | usUfsuCfaCfaAfaUfgUfgUfaCfaUfususu |
| ETD01551 | 7570 | [ETL2]csusgcAfuUfgAfuggguuuugususu | 7590 | asCfsaaaAfcccaucaAfuGfcagsusu |
| ETD02023 | 7571 | [ETL2]aaacUfCfaaCfuCfcaucaagasusu | 7591 | usCfsuUfgAfuGfgAfgUfuGfaGfuUfususu |
| ETD02024 | 7572 | [ETL2]caaaAfucuGfcAfaaccaguasusu | 7592 | usAfscUfgGfuUfuGfcAfgAfuUfuUfgsusu |
| ETD02025 | 7573 | [ETL2]ucuuacaGfAfAfAfgcuuuguasusu | 7593 | usAfscAfaAfgCfuUfuCfuGfuAfaGfasusu |
| ETD02026 | 7574 | [ETL2]uuacagAfAfAfGfcuuuguagasusu | 7594 | usCfsuAfcAfaAfgCfuUfuCfuGfuAfasusu |
| ETD02027 | 7575 | [ETL2]agcuuuGfuAfGfcagaauauasusu | 7595 | usAfsuAfuUfcUfgCfuAfcAfaAfgCfususu |
| ETD02028 | 7576 | [ETL2]gcuuuGfuAfGfcAfgaauauaasusu | 7596 | usUfsaUfaUfuCfuGfcUfaCfaAfaGfcsusu |
| ETD02029 | 7577 | [ETL2]gcagaaUfaUfaUfuugcagcasusu | 7597 | usGfscUfgCfaAfaUfaUfaUfuCfuGfcsusu |
| ETD01043 | 7578 | GfsasAfgGfuAfGfAfuGfgUfgUfuAfuAfsusu | 7598 | usAfsuAfaCfaCfcAfucuAfcCfuUfcsusu |
| | | [ETL5] | | |

### Example 4: siRNA-Mediated Knockdown of DKK2 in Dermal Fibroblast Cell Line

[0253] In this prophetic experiment, siRNAs targeted to the DKK2 mRNA that downregulate levels of DKK2 mRNA are transfected into cultured dermal fibroblast cell. Downregulation of DKK2 mRNA (and ultimately protein) subsequently leads to an increase in protein levels of β-catenin, α-SMA, and collagens I and III in cultured dermal fibroblast cells.

[0254] On Day 0, the dermal fibroblast cells are seeded at 150,000 cells/mL into a Falcon 24-well tissue culture plate (Cat. No. 353047) at 0.5 mL per well.

[0255] On Day 1, the DKK2 siRNA and negative control siRNA master mixes are prepared. The DKK2 siRNA master mix contains 350 uL of Opti-MEM (ThermoFisher Cat. No. 4427037—s1288 Lot No. AS02B02D) and 3.5 ul of a mixture of the two DKK2 siRNAs (10 uM stock). The negative control siRNA master mix contains 350 uL of Opti-MEM and 3.5 ul of negative control siRNA (ThermoFisher Cat. No. 4390843, 10 uM stock). Next, 3 uL of TransIT-X2 (Mirus Cat. No. MIR6000) is added to each master mix. The mixes are incubated for 15 minutes to allow transfection complexes to form, then 51 ul of the appropriate master mix+TransIT-X2 is added to quadruplicate wells of dermal fibroblast cells with a final siRNA concentration of 10 nM.

[0256] On Day 3, 48 hours post transfection, duplicate wells of dermal fibroblast cells are lysed using the Cells-to-Ct kit according to the manufacturer's protocol (ThermoFisher Cat. No. 4399002). In brief, cells are washed with 50 ul using cold 1×PBS and lysed by adding 49.5 ul of Lysis Solution and 0.5 ul DNase I per well and pipetting up and down 5 times and incubating for 5 minutes at room temperature. The Stop Solution (5 ul/well) is added to each well and mixed by pipetting up and down five times and incubating at room temperature for 2 minutes. The reverse transcriptase reaction is performed using 22.5 ul of the lysate according to the manufacturer's protocol. Samples are stored at −80° C. until real-time qPCR is performed in triplicate using TaqMan Gene Expression Assays (Applied Biosystems FAM/DKK2 using a BioRad iCycler).

[0257] On Day 3, 48 hours post transfection, corresponding duplicate wells to the those lysed with the Cells-to-Ct kit are lysed with (1×PBS, 1% NP-40, 0.1% sodium dodecylsulfate (SDS), 5 mM EDTA, 0.5% sodium deoxycholate, and 1 mM sodium orthovanadate) with protease inhibitors (Pierce). In brief, cells are washed with 50 ul using cold 1×PBS and lysed by adding 100 ul of RIPA buffer and triturated 5 times by manual pipet. The protein concentrations in the cell lysates are determined by BCA Protein Assay Kit (Pierce). SDS-PAGE is done in 8% glycine gels (Bio-rad) loading equal amount of proteins per lane. After electrophoresis, separated proteins are transferred to nitrocellulose membrane (Bio-rad) and blocked with 5% non-fat milk in TBST buffer for 1 h. After that, the membranes are incubated with DKK2 (1:600; CST), β-Catenin (1:800; CST), alpha smooth muscle Actin (1:800; abeam), Collagen I (1:800; abeam), Collagen III (1:800; abeam) and GAPDH (1:2,000; CST), loading control, antibodies overnight at 4° C., and then anti-rabbit IgG monoclonal antibody conjugated with horseradish peroxidase (Pierce) at 1:2000 dilution for 1 h at room temperature. Protein bands are detected using the West Femto system (Pierce).

[0258] A decrease in DKK2 mRNA expression in the dermal fibroblast cells is expected after transfection with the DKK2 siRNAs compared to DKK2 mRNA levels in dermal fibroblast cells transfected with the non-specific control siRNA 48 hours after transfection. There is an expected increase in protein levels of 3-catenin, α-SMA, and collagens I and III in wells containing dermal fibroblast s cells transfected with the DKK2 siRNAs relative to the amount of β-catenin, α-SMA, and collagens I and III in wells containing dermal fibroblast cells transfected with a non-specific control siRNA 48 hours after transfection. These results show that the DKK2 siRNAs elicit knockdown of DKK2 mRNA in dermal fibroblast cells and that the decrease in DKK2 expression is correlated with an increase in β-catenin, α-SMA, and collagens I and III production.

### Example 5: ASO-Mediated Knockdown of DKK2 in Dermal Fibroblast Cell Line

[0259] In this prophetic experiment, ASOs targeted to the DKK2 mRNA that downregulate levels of DKK2 mRNA are transfected into cultured dermal fibroblast cell. Downregulation of DKK2 mRNA (and ultimately protein) subsequently leads to an increase in protein levels of β-catenin, α-SMA, and collagens I and III in cultured dermal fibroblast cells.

[0260] On Day 0, the dermal fibroblast cells are seeded at 150,000 cells/mL into a Falcon 24-well tissue culture plate (Cat. No. 353047) at 0.5 mL per well.

[0261] On Day 1, the DKK2 ASO and negative control ASO master mixes are prepared. The DKK2 ASO master mix contains 350 uL of Opti-MEM (ThermoFisher Cat. No. 4427037—s1288 Lot No. AS02B02D) and 3.5 ul of a mixture of the two DKK2 ASOs (10 uM stock). The negative control ASO master mix contains 350 uL of Opti-MEM and 3.5 ul of negative control ASO (ThermoFisher Cat. No. 4390843, 10 uM stock). Next, 3 uL of TransIT-X2 (Mirus Cat. No. MIR6000) is added to each master mix. The mixes are incubated for 15 minutes to allow transfection complexes to form, then 51 ul of the appropriate master mix+TransIT-X2 is added to quadruplicate wells of dermal fibroblast cells with a final ASO concentration of 10 nM.

[0262] On Day 3, 48 hours post transfection, duplicate wells of dermal fibroblast cells are lysed using the Cells-to-Ct kit according to the manufacturer's protocol (ThermoFisher Cat. No. 4399002). In brief, cells are washed with 50 ul using cold 1×PBS and lysed by adding 49.5 ul of Lysis Solution and 0.5 ul DNase I per well and pipetting up and down 5 times and incubating for 5 minutes at room temperature. The Stop Solution (5 ul/well) is added to each well and mixed by pipetting up and down five times and incubating at room temperature for 2 minutes. The reverse transcriptase reaction is performed using 22.5 ul of the lysate according to the manufacturer's protocol. Samples are stored at −80° C. until real-time qPCR is performed in triplicate using TaqMan Gene Expression Assays (Applied Biosystems FAM/DKK2 using a BioRad iCycler).

[0263] On Day 3, 48 hours post transfection, corresponding duplicate wells to the those lysed with the Cells-to-Ct kit are lysed with (1×PBS, 1% NP-40, 0.1% sodium dodecylsulfate (SDS), 5 mM EDTA, 0.5% sodium deoxycholate, and 1 mM sodium orthovanadate) with protease inhibitors (Pierce). In brief, cells are washed with 50 ul using cold 1×PBS and lysed by adding 100 ul of RIPA buffer and triturated 5 times by manual pipet. The protein concentrations in the cell lysates are determined by BCA Protein Assay Kit (Pierce). SDS-PAGE is done in 8% glycine gels (Bio-rad) loading equal amount of proteins per lane. After electrophoresis, separated proteins are transferred to nitrocellulose membrane (Bio-rad) and blocked with 5% non-fat milk in TBST buffer for 1h. After that, the membranes are incubated with DKK2 (1:600; CST), β-Catenin (1:800; CST), alpha smooth muscle Actin (1:800; abeam), Collagen I (1:800; abeam), Collagen III (1:800; abeam) and GAPDH (1:2,000; CST), loading control, antibodies overnight at 4° C., and then anti-rabbit IgG monoclonal antibody conjugated with horseradish peroxidase (Pierce) at 1:2000 dilution for 1 h at room temperature. Protein bands are detected using the West Femto system (Pierce).

[0264] A decrease in DKK2 mRNA expression in the dermal fibroblast cells is expected after transfection with the DKK2 ASOs compared to DKK2 mRNA levels in dermal fibroblast cells transfected with the non-specific control ASO 48 hours after transfection. There is an expected increase in protein levels of β-catenin, α-SMA, and collagens I and III in wells containing dermal fibroblast s cells transfected with the DKK2 ASOs relative to the amount of β-catenin, α-SMA, and collagens I and III in wells containing dermal fibroblast cells transfected with a non-specific control ASO 48 hours after transfection. These results show that the DKK2 ASOs elicit knockdown of DKK2 mRNA in dermal fibroblast cells and that the decrease in DKK2 expression is correlated with an increase in β-catenin, α-SMA, and collagens I and III production.

### Example 6: Inhibition of DKK2 in a Mouse Model of Hair Regrowth Using Modified DKK2 siRNAs and ASOs

[0265] In this prophetic experiment, a mouse model of hair regrowth is used to evaluate the effect of siRNA and ASO inhibition of DKK2. The model involves treatment of shaved skin in 50 day old C57BL mice. Mice typically begin telogen at approximately post-natal day 50, and enter anagen 4-5 weeks later.

[0266] Briefly, mice are divided into four groups: Group 1—a group treated with non-targeting control siRNA, Group 2—a group treated with non-targeting control ASO, Group 3—a group treated with DKK2 siRNA1, Group 4—a group treated with DKK2 ASO1. Each group contains eight mice (4 males, 4 females). Each group has an equal portion of the hind limb shaved divided visually into 12 sections. Each section is assessed weekly and given a s.

[0267] Administration of siRNA or ASO is achieved with a topical application of siRNA or ASO resuspended in vehicle at concentration of 10 uM to the portion of the mouse skin initially exposed by shaving. On Study Day 0, Group 1 mice will be treated with non-targeting control siRNA, Group 2 mice will be treated with non-targeting control ASO, Group 3 mice will be treated with siRNA1 targeting human DKK2, Group 4 mice will be treated with ASO1 targeting human DKK2, and Group 5 mice will be treated with vehicle. Mice are treated once a week for 7 weeks with the final assessment taken 7 days after final treatment.

[0268] 7 days after the final treatment, the mice are sacrificed by cervical dislocation following an intraperitoneal injection of 0.3 ml Nembutal (5 mg/ml). The shaved portion of skin tissue is collected and stored in RNAlater.

[0269] mRNA is isolated from tissue placed in RNAlater solution using the PureLink kit according to the manufacturer's protocol (ThermoFisher Cat. No. 12183020). The reverse transcriptase reaction is performed according to the manufacturer's protocol. Samples are stored at −80° C. until real-time qPCR is performed in triplicate using TaqMan Gene Expression Assays (Applied Biosystems FAM/DKK2 using a BioRad iCycler). There is an expected decrease in DKK2 mRNA expression in skin tissue from mice dosed with the DKK2 siRNA1 or ASO1 compared to DKK2 mRNA levels in the skin tissue from mice dosed with the non-specific controls. There is an expected increase in hair growth in the mice that receive the DKK2 siRNA or ASO compared to the hair growth in mice that receive the non-specific control. These results show that the DKK2 siRNA or ASO elicit knockdown of DKK2 mRNA in a mouse model of hair regrowth and that the decrease in DKK2 expression is correlated with a shortened telogen and accelerated anagen phase resulting in an increase in total hair regrowth.

### Example 7: Clinical Experiments of Inhibition of DKK2 on Hair Loss

[0270] In this prophetic experiment, human subjects with hair loss (including male pattern baldness, alopecia areata, or non-scarring hair loss) are treated topically with an siRNA or ASO targeting DKK2, or with a control such as a placebo. For example, a topical formulation comprising the siRNA or ASO is administered to the scalp of the subject.

[0271] Signs and symptoms of hair loss are observed before, during, and after the treatment. For example, any one or more of the following may be determined: Men's Hair Growth Questionnaire (MHGQ) results, Kingsley Alopecia Profile (KAP) results, total hair counts, vellus hair counts, non-vellus hair counts, hair thickness measurements, hair density measurements, numbers of hair follicles (including total hair follicles, terminal hair follicles, anagen hair follicles, telogen hair follicles, catagen hair follicles, vellus or vellus-like miniaturized hair follicles, and indeterminate hair follicles), and protein and mRNA levels for β-catenin, α-SMA, collagen I, and collagen III. Additionally, DKK2 protein (circulating and skin) levels and DKK2 mRNA (skin) levels are determined. The topical treatment with either the siRNA or the ASO is expected to improve these measurements.

### Example 8: Oligonucleotide Synthesis

[0272] Oligonucleotides such as siRNAs may be synthesized according to phosphoramidite technology on a solid phase. For example, a K&A oligonucleotide synthesizer may be used. Syntheses may be performed on a solid support made of controlled pore glass (CPG, 500 Å or 600 Å, obtained from AM Chemicals, Oceanside, CA, USA). All 2′-OMe and 2′-F phosphoramidites may be purchased from Hongene Biotech (Union City, CA, USA). All phosphoramidites may be dissolved in anhydrous acetonitrile (100 mM) and molecular sieves (3 Å) may be added. 5-Benzylthio-1H-tetrazole (BTT, 250 mM in acetonitrile) or 5-Ethylthio-1H-tetrazole (ETT, 250 mM in acetonitrile) may be used as activator solution. Coupling times may be 9-18 min (e.g. with a GalNAc such as ETL17), 6 min (e.g. with 2′OMe and 2′F). In order to introduce phosphorothioate linkages, a 100 mM solution of 3-phenyl 1,2,4-dithiazoline-5-one (POS, obtained from PolyOrg, Inc., Leominster, Mass., USA) in anhydrous acetonitrile may be employed.

[0273] After solid phase synthesis, the dried solid support may be treated with a 1:1 volume solution of 40 wt. % methylamine in water and 28% ammonium hydroxide solution (Aldrich) for two hours at 30° C. The solution may be evaporated and the solid residue may be reconstituted in water and purified by anionic exchange HPLC using a TKSgel SuperQ-5PW 13u column. Buffer A may be 20 mM Tris, 5 mM EDTA, pH 9.0 and contained 20% Acetonitrile and buffer B may be the same as buffer A with the addition of 1 M sodium chloride. UV traces at 260 nm may be recorded. Appropriate fractions may be pooled then desalted using Sephadex G-25 medium.

[0274] Equimolar amounts of sense and antisense strand may be combined to prepare a duplex. The duplex solution may be prepared in 0.1×PBS (Phosphate-Buffered Saline, 1×, Gibco). The duplex solution may be annealed at 95° C. for 5 min, and cooled to room temperature slowly. Duplex concentration may be determined by measuring the solution absorbance on a UV-Vis spectrometer at 260 nm in 0.1×PBS. For some experiments, a conversion factor may be calculated from an experimentally determined extinction coefficient.

### Example 9: GalNAc Ligand for Hepatocyte Targeting of Oligonucleotides

[0275] Without limiting the disclosure to these individual methods, there are at least two general methods for attachment of multivalent N-acetylgalactosamine (GalNAc) ligands to oligonucleotides: solid or solution-phase conjugations. GalNAc ligands may be attached to solid phase resin for 3′ conjugation or at the 5′ terminus using GalNAc phosphoramidite reagents. GalNAc phosphoramidites may be coupled on solid phase as for other nucleosides in the oligonucleotide sequence at any position in the sequence. Reagents for GalNAc conjugation to oligonucleotides are shown in Table 7.

TABLE 7
GalNAc Conjugation Reagents

| Type of | |
|---|---|
| conjugation | Structure |
| Solid phase 3′ attachment where squiggly line is rest of oligonucleotide chain and right-most OH is where attachment′to solid phase is. | [chemical structure] |
| | This GalNAc ligand may be referred to as “GalNAc23” or “GalNAc#23.” |
| Solid phase 5′ attachment phosphoramidite | [chemical structure] |
| Solid phase 5′ attachment Phosphoramidite | [chemical structure] |
| Solution phase Carboxylic acid for amide coupling anywhere on oligonucleotide | [chemical structure] |
| | Where Ac is an acetyl group or other hydroxyl protecting group that can be removed |
| | under basic, acid or reducing conditions. |

[0276] In solution phase conjugation, the oligonucleotide sequence—including a reactive conjugation site—is formed on the resin. The oligonucleotide is then removed from the resin and GalNAc is conjugated to the reactive site.

[0277] The carboxy GalNAc derivatives may be coupled to amino-modified oligonucleotides. The peptide coupling conditions are known to the skilled in the art using a carbodiimide coupling agent like DCC (N,N′-Dicyclohexylcarbodiimide), EDC (N-(3-dimethylaminopropyl)-N′-ethylcarbodiimide) or EDC·HCl (N-(3-dimethylaminopropyl)-N′-ethylcarbodiimide hydrochloride and an additive like HOBt (1-hydroxybenztriazole), HOSu (N-hydroxysuccinimide), TBTU (N,N,N′,N′-Tetramethyl-O-(benzotriazol-1-yl)uronium tetrafluoroborate, HBTU (2-(1H-benzotriazol-1-yl)-1,1,3,3-tetramethyluronium hexafluorophosphate) or HOAt (1-Hydroxy-7-azabenzotriazole and common combinations thereof such as TBTU/HOBt or HBTU/HOAt to form activated amine-reactive esters.

[0278] Amine groups may be incorporated into oligonucleotides using a number of known, commercially available reagents at the 5′ terminus, 3′ terminus or anywhere in between.

[0279] Non-limiting examples of reagents for oligonucleotide synthesis to incorporate an amino group include:
[0280] 5′ attachment:
[0281] 6-(4-Monomethoxytritylamino)hexyl-(2-cyanoethyl)-(N,N-diisopropyl)-phosphoramidite CAS Number: 114616-27-2
[0282] 5′-Amino-Modifier TEG CE-Phosphoramidite
[0283] 10-(O-trifluoroacetamido-N-ethyl)-triethyleneglycol-1-[(2-cyanoethyl)-(N,N-diisopropyl)]-phosphoramidite
[0284] 3′ attachment:
[0285] 3′-Amino-Modifier Serinol CPG
[0286] 3-Dimethoxytrityloxy-2-(3-(fluorenylmethoxycarbonylamino)propanamido)propyl-1-O-succinyl-long chain alkylamino-CPG (where CPG stands for controlled-pore glass and is the solid support)
[0287] Amino-Modifier Serinol Phosphoramidite
[0288] 3-Dimethoxytrityloxy-2-(3-(fluorenylmethoxycarbonylamino)propanamido)propyl-1-O-(2-cyanoethyl)-(N,N-diisopropyl)-phosphoramidite

[0289] Internal (base modified):
[0290] Amino-Modifier C6 dT
[0291] 5′-Dimethoxytrityl-5-[N-(trifluoroacetylaminohexyl)-3-acrylimido]-2′-deoxyUridine,3′-[(2-cyanoethyl)-(N,N-diisopropyl)]-phosphoramidite. CAS Number: 178925-21-8

[0292] Solution phase conjugations may occur after oligonucleotide synthesis via reactions between non-nucleosidic nucleophilic functional groups that are attached to the oligonucleotide and electrophilic GalNAc reagents. Examples of nucleophilic groups include amines and thiols, and examples of electrophilic reagents include activated esters (e.g. N-hydroxysuccinimide, pentafluorophenyl) and maleimides.

### Example 10: GalNAc Ligands for Hepatocyte Targeting of Oligonucleotides

[0293] Without limiting the disclosure to these individual methods, there are at least two general methods for attachment of multivalent N-acetylgalactosamine (GalNAc) ligands to oligonucleotides: solid or solution-phase conjugations. GalNAc ligands may be attached to solid phase resin for 3′ conjugation or at the 5′ terminus using GalNAc phosphoramidite reagents. GalNAc phosphoramidites may be coupled on solid phase as for other nucleosides in the oligonucleotide sequence at any position in the sequence. A non-limiting example of a phosphoramidite reagent for GalNAc conjugation to a 5′ end oligonucleotide is shown in Table 8.

TABLE 8
GalNAc Conjugation Reagent

| Type of | |
|---|---|
| conjugation | Structure |
| Solid phase 5′ attachment phosphoramidite | [chemical structure] |

[0294] The following includes examples of synthesis reactions used to create a GalNAc moiety:

### Scheme for the Preparation of NAcegal-Linker-TMSOTf

[chemical structure]

### General Procedure for Preparation of Compound 2A

[chemical structure]

[0297] To a solution of Compound 1A (500 g, 4.76 mol, 476 mL) in 2-Methyl-THF (2.00 L) is added CbzCl (406 g, 2.38 mol, 338 mL) in 2-Methyl-THF (750 mL) dropwise at 0° C. The mixture is stirred at 25° C. for 2 hrs under N₂ atmosphere. TLC (DCM:MeOH=20:1, PMA) may indicate CbzCl is consumed completely and one new spot (R_{f}=0.43) formed. The reaction mixture is added HCl/EtOAc (1 N, 180 mL) and stirred for 30 mins, white solid is removed by filtration through celite, the filtrate is concentrated under vacuum to give Compound 2A (540 g, 2.26 mol, 47.5% yield) as a pale yellow oil and used into the next step without further purification. ¹H NMR: δ 7.28-7.41 (m, 5H), 5.55 (br s, 1H), 5.01-5.22 (m, 2H), 3.63-3.80 (m, 2H), 3.46-3.59 (m, 4H), 3.29-3.44 (m, 2H), 2.83-3.02 (m, 1H).

### General Procedure for Preparation of Compound 4A

[chemical structure]

[0299] To a solution of Compound 3A (1.00 kg, 4.64 mol, HCl) in pyridine (5.00 L) is added acetyl acetate (4.73 kg, 46.4 mol, 4.34 L) dropwise at 0° C. under N₂ atmosphere. The mixture is stirred at 25° C. for 16 hrs under N₂ atmosphere. TLC (DCM:MeOH=20:1, PMA) indicated Compound 3A is consumed completely and two new spots (R_{f}=0.35) formed. The reaction mixture is added to cold water (30.0 L) and stirred at 0° C. for 0.5 hr, white solid formed, filtered and dried to give Compound 4A (1.55 kg, 3.98 mol, 85.8% yield) as a white solid and used in the next step without further purification. ¹H NMR: δ 7.90 (d, J=9.29 Hz, 1H), 5.64 (d, J=8.78 Hz, 1H), 5.26 (d, J=3.01 Hz, 1H), 5.06 (dd, J=11.29, 3.26 Hz, 1H), 4.22 (t, J=6.15 Hz, 1H), 3.95-4.16 (m, 3H), 2.12 (s, 3H), 2.03 (s, 3H), 1.99 (s, 3H), 1.90 (s, 3H), 1.78 (s, 3H).

### General Procedure for Preparation of Compound 5A

[chemical structure]

[0301] To a solution of Compound 4A (300 g, 771 mmol) in DCE (1.50 L) is added TMSOTf (257 g, 1.16 mol, 209 mL) and stirred for 2 hrs at 60° C., and then stirred for 1 hr at 25° C. Compound 2A (203 g, 848 mmol) is dissolved in DCE (1.50 L) and added 4 Å powder molecular sieves (150 g) stirring for 30 mins under N₂ atmosphere. Then the solution of Compound 4A in DCE is added dropwise to the mixture at 0° C. The mixture is stirred at 25° C. for 16 hrs under N₂ atmosphere. TLC (DCM:MeOH=25:1, PMA) indicated Compound 4A is consumed completely and new spot (R_{f}=0.24) formed. The reaction mixture is filtered and washed with sat. NaHCO₃ (2.00 L), water (2.00 L) and sat. brine (2.00 L). The organic layer is dried over anhydrous Na₂SO4, filtered and concentrated under reduced pressure to give a residue. The residue is triturated with 2-Me-THE/heptane (5/3, v/v, 1.80 L) for 2 hrs, filtered and dried to give Compound 5A (225 g, 389 mmol, 50.3% yield, 98.4% purity) as a white solid. ¹H NMR: δ 7.81 (d, J=9.29 Hz, 1H), 7.20-7.42 (m, 6H), 5.21 (d, J=3.26 Hz, 1H), 4.92-5.05 (m, 3H), 4.55 (d, J=8.28 Hz, 1H), 3.98-4.07 (m, 3H), 3.82-3.93 (m, 1H), 3.71-3.81 (m, 1H), 3.55-3.62 (m, 1H), 3.43-3.53 (m, 2H), 3.37-3.43 (m, 2H), 3.14 (q, J=5.77 Hz, 2H), 2.10 (s, 3H), 1.99 (s, 3H), 1.89 (s, 3H), 1.77 (s, 3H).

### General Procedure for Preparation of NAcegal-Linker-Tosylate Salt

[chemical structure]

[0303] To a solution of Compound 5A (200 g, 352 mmol) in THF (1.0 L) is added dry Pd/C (15.0 g, 10% purity) and TsOH (60.6 g, 352 mmol) under N₂ atmosphere. The suspension is degassed under vacuum and purged with H₂ several times. The mixture is stirred at 25° C. for 3 hrs under H₂ (45 psi) atmosphere. TLC (DCM:MeOH=10:1, PMA) indicated Compound 5A is consumed completely and one new spot (R_{f}=0.04) is formed. The reaction mixture is filtered and concentrated (≤40° C.) under reduced pressure to give a residue. Diluted with anhydrous DCM (500 mL, dried overnight with 4 Å molecular sieves (dried at 300° C. for 12 hrs)) and concentrate to give a residue and run Karl Fisher (KF) to check for water content. This is repeated 3 times with anhydrous DCM (500 mL) dilutions and concentration to give NAcegal-Linker-TMSOTf (205 g, 95.8% yield, TsOH salt) as a foamy white solid. ¹H NMR: δ 7.91 (d, J=9.03 Hz, 1H), 7.53-7.86 (m, 2H), 7.49 (d, J=8.03 Hz, 2H), 7.13 (d, J=8.03 Hz, 2H), 5.22 (d, J=3.26 Hz, 1H), 4.98 (dd, J=11.29, 3.26 Hz, 1H), 4.57 (d, J=8.53 Hz, 1H), 3.99-4.05 (m, 3H), 3.87-3.94 (m, 1H), 3.79-3.85 (m, 1H), 3.51-3.62 (m, 5H), 2.96 (br t, J=5.14 Hz, 2H), 2.29 (s, 3H), 2.10 (s, 3H), 2.00 (s, 3H), 1.89 (s, 3H), 1.78 (s, 3H).

### Scheme for the Preparation of TRIS-PEG2-CBZ

[chemical structure]

[chemical structure]

[chemical structure]

### General Procedure for Preparation of Compound 5B

[chemical structure]

[0306] To a solution of Compound 4B (400 g, 1.67 mol, 1.00 eq) and NaOH (10 M, 16.7 mL, 0.10 eq) in THF (2.00 L) is added Compound 4B_2 (1.07 kg, 8.36 mol, 1.20 L, 5.00 eq), the mixture is stirred at 30° C. for 2 hrs. LCMS showed the desired MS is given. Five batches of solution are combined to one batch, then the mixture is diluted with water (6.00 L), extracted with ethyl acetate (3.00 L*3), the combined organic layer is washed with brine (3.00 L), dried over Na₂SO₄, filtered and concentrated under vacuum. The crude is purified by column chromatography (SiO₂, petroleum ether:ethyl acetate=100:1-10:1, R_{f}=0.5) to give Compound 5B (2.36 kg, 6.43 mol, 76.9% yield) as light yellow oil. HNMR: δ 7.31-7.36 (m, 5H), 5.38 (s, 1H), 5.11-5.16 (m, 2H), 3.75 (t, J=6.4 Hz), 3.54-3.62 (m, 6H), 3.39 (d, J=5.2 Hz), 2.61 (t, J=6.0 Hz).

### General procedure for preparation of 3-oxo-1-phenyl-2,7,10-trioxa-4-azatridecan-13-oic acid (Compound 2B below)

[chemical structure]

[0308] To a solution of Compound 5B (741 g, 2.02 mol, 1.00 eq) in DCM (2.80 L) is added TFA (1.43 kg, 12.5 mol, 928 mL, 6.22 eq), the mixture is stirred at 25° C. for 3 hrs. LCMS showed the desired MS is given. The mixture is diluted with DCM (5.00 L), washed with water (3.00 L*3), brine (2.00 L), the combined organic layer is dried over Na₂SO₄, filtered and concentrated under vacuum to give Compound 2B (1800 g, crude) as light yellow oil. HNMR: δ 9.46 (s, 5H), 7.27-7.34 (m, 5H), 6.50-6.65 (m, 1H), 5.71 (s, 1H), 5.10-5.15 (m, 2H), 3.68-3.70 (m, 14H), 3.58-3.61 (m, 6H), 3.39 (s, 2H), 2.55 (s, 6H), 2.44 (s, 2H).

### General Procedure for Preparation of Compound 3B

[chemical structure]

[0310] To a solution of Compound 2B (375 g, 999 mmol, 83.0% purity, 1.00 eq) in DCM (1.80 L) is added HATU (570 g, 1.50 mol, 1.50 eq) and DIEA (258 g, 2.00 mol, 348 mL, 2.00 eq) at 0° C., the mixture is stirred at 0° C. for 30 min, then Compound 1B (606 g, 1.20 mol, 1.20 eq) is added, the mixture is stirred at 25° C. for 1 hr. LCMS showed desired MS is given. The mixture is combined to one batch, then the mixture is diluted with DCM (5.00 L), washed with 1 N HCl aqueous solution (2.00 L*2), then the organic layer is washed with saturated Na₂CO₃ aqueous solution (2.00 L*2) and brine (2.00 L), the organic layer is dried over Na₂SO₄, filtered and concentrated under vacuum to give Compound 3B (3.88 kg, crude) as yellow oil.

### General Procedure for Preparation of TRIS-PEG2-CBZ.

[chemical structure]

[0312] A solution of Compound 3B (775 g, 487 mmol, 50.3% purity, 1.00 eq) in HCl/dioxane (4 M, 2.91 L, 23.8 eq) is stirred at 25° C. for 2 hrs. LCMS showed the desired MS is given. The mixture is concentrated under vacuum to give a residue. Then the combined residue is diluted with DCM (5.00 L), adjusted to pH=8 with 2.5 M NaOH aqueous solution, and separated. The aqueous phase is extracted with DCM (3.00 L) again, then the aqueous solution is adjusted to pH=3 with 1 N HCl aqueous solution, then extracted with DCM (5.00 L*2), the combined organic layer is washed with brine (3.00 L), dried over Na₂SO₄, filtered and concentrated under vacuum. The crude is purified by column chromatography (SiO₂, DCM:MeOH=0:1-12:1, 0.1% HOAc, R_{f}=0.4). The residue is diluted with DCM (5.00 L), adjusted to pH=8 with 2.5 M NaOH aqueous solution, separated, the aqueous solution is extracted with DCM (3.00 L) again, then the aqueous solution is adjusted to pH=3 with 6 N HCl aqueous solution, extracted with DCM:MeOH=10:1 (5.00 L*2), the combined organic layer is washed with brine (2.00 L), dried over Na₂SO₄, filtered and concentrated under vacuum to give a residue. Then the residue is diluted with MeCN (5.00 L), concentrated under vacuum, repeat this procedure twice to remove water to give TRIS-PEG2-CBZ (1.25 kg, 1.91 mol, 78.1% yield, 95.8% purity) as light yellow oil. ¹HNMR: 400 MHz, MeOD, δ 7.30-7.35 (5H), 5.07 (s, 2H), 3.65-3.70 (m, 16H), 3.59 (s, 4H), 3.45 (t, J=5.6 Hz), 2.51 (t, J=6.0 Hz), 2.43 (t, 6.4 Hz).

### Scheme for the Preparation of TriNGal-TRIS-Pes2-Phosph 8c

[chemical structure]

[chemical structure]

[chemical structure]

[chemical structure]

### TriGNal-TRIS-Peg2-Phosph 8c

### General Procedure for Preparation of Compound 3C

[chemical structure]

[0315] To a solution of Compound 1C (155 g, 245 mmol, 1.00 eq) in ACN (1500 mL) is added TBTU (260 g, 811 mmol, 3.30 eq), DIEA (209 g, 1.62 mol, 282 mL, 6.60 eq) and Compound 2C (492 g, 811 mmol, 3.30 eq, TsOH) at 0° C., the mixture is stirred at 15° C. for 16 hrs. LCMS showed the desired MS is given. The mixture is concentrated under vacuum to give a residue, then the mixture is diluted with DCM (2000 mL), washed with 1 N HCl aqueous solution (700 mL*2), then saturated NaHCO₃ aqueous solution (700 mL*2) and concentrated under vacuum. The crude is purified by column chromatography to give Compound 3C (304 g, 155 mmol, 63.1% yield, 96.0% purity) as a yellow solid.

### General Procedure for Preparation of Compound 4C

[chemical structure]

[0317] Two batches solution of Compound 3C (55.0 g, 29.2 mmol, 1.00 eq) in MeOH (1600 mL) is added Pd/C (6.60 g, 19.1 mmol, 10.0% purity) and TFA (3.34 g, 29.2 mmol, 2.17 mL, 1.00 eq), the mixture is degassed under vacuum and purged with H₂. The mixture is stirred under H₂ (15 psi) at 15° C. for 2 hours. LCMS showed the desired MS is given. The mixture is filtered and the filtrate is concentrated under vacuum to give Compound 4C (106 g, 54.8 mmol, 93.7% yield, 96.2% purity, TFA) as a white solid.

### General Procedure for Preparation of Compound 5C

[chemical structure]

[0319] Two batches in parallel. To a solution of EDCI (28.8 g, 150 mmol, 1.00 eq) in DCM (125 mL) is added compound 4a (25.0 g, 150 mmol, 1.00 eq) dropwise at 0° C., then the mixture is added to compound 4 (25.0 g, 150 mmol, 1.00 eq) in DCM (125 mL) at 0° C., then the mixture is stirred at 25° C. for 1 hr. TLC (Petroleum ether:Ethyl acetate=3:1, R_{f}=0.45) showed the reactant is consumed and one new spot is formed. The reaction mixture is diluted with DCM (100 mL) then washed with aq.NaHCO₃ (250 mL*1) and brine (250 mL), dried over Na₂SO₄, filtered and concentrated under reduced pressure to give a residue. The residue is purified by column chromatography (SiO₂, Petroleum ether:Ethyl acetate=100:1 to 3:1), TLC (SiO₂, Petroleum ether:Ethyl acetate=3:1), R_{f}=0.45, then concentrated under reduced pressure to give a residue. Compound 5C (57.0 g, 176 mmol, 58.4% yield, 96.9% purity) is obtained as colorless oil and confirmed ¹HNMR: EW33072-2-P1A, 400 MHz, DMSO δ 9.21 (s, 1H), 7.07-7.09 (m, 2H), 6.67-6.70 (m, 2H), 3.02-3.04 (m, 2H), 2.86-2.90 (m, 2H)

### General Procedure for Preparation of Compound 6

[chemical structure]

[0321] To a mixture of compound 3 (79.0 g, 41.0 mmol, 96.4% purity, 1.00 eq, TFA) and compound 6C (14.2 g, 43.8 mmol, 96.9% purity, 1.07 eq) in DCM (800 mL) is added TEA (16.6 g, 164 mmol, 22.8 mL, 4.00 eq) dropwise at 0° C., the mixture is stirred at 15° C. for 16 hrs. LCMS (EW33072-12-P1B, Rt=0.844 min) showed the desired mass is detected. The reaction mixture is diluted with DCM (400 mL) and washed with aq.NaHCO₃ (400 mL*1) and brine (400 mL*1), then the mixture is diluted with DCM (2.00 L) and washed with 0.7 M Na₂CO₃ (1000 mL*3) and brine (800 mL*3), dried over Na₂SO₄, filtered and concentrated under reduced pressure to give a residue. The residue is used to next step directly without purification. Compound 6 (80.0 g, crude) is obtained as white solid and confirmed via ¹HNMR: EW33072-12-P1A, 400 MHz, MeOD δ 7.02-7.04 (m, 2H), 6.68-6.70 (m, 2H), 5.34-5.35 (s, 3H), 5.07-5.08 (d, J=4.00 Hz, 3H), 4.62-4.64 (d, J=8.00 Hz, 3H), 3.71-4.16 (m, 16H), 3.31-3.70 (m, 44H), 2.80-2.83 (m, 2H), 2.68 (m, 2H), 2.46-2.47 (m, 10H), 2.14 (s, 9H), 2.03 (s, 9H), 1.94-1.95 (d, J=4.00 Hz, 18H).

### General Procedure for Preparation of TriGNal-TRIS-Peg2-Phosph 8c

[chemical structure]

[0323] Two batches are synthesized in parallel. To a solution of compound 6C (40.0 g, 21.1 mmol, 1.00 eq in DCM (600 mL) is added diisopropylammonium tetrazolide (3.62 g, 21.1 mmol, 1.00 eq) and compound 7c (6.37 g, 21.1 mmol, 6.71 mL, 1.00 eq) in DCM (8.00 mL) drop-wise, the mixture is stirred at 30° C. for 1 hr, then added compound 7c (3.18 g, 10.6 mmol, 3.35 mL, 0.50 eq) in DCM (8.00 mL) drop-wise, the mixture is stirred at 30° C. for 30 mins, then added compound 7c (3.18 g, 10.6 mmol, 3.35 mL, 0.50 eq) in DCM (8.00 mL) drop-wise, the mixture is stirred at 30° C. for 1.5 hrs. LCMS (EW33072-17-P1C1, Rt=0.921 min) showed the desired MS+1 is detected. LCMS (EW33072-17-P1C2, Rt=0.919 min) showed the desired MS+1 is detected. Two batches are combined for work-up. The mixture is diluted with DCM (1.20 L), washed with saturated NaHCO₃ aqueous solution (1.60 L*2), 3% DMF in H₂O (1.60 L*2), H₂O (1.60 L*3), brine (1.60 L), dried over Na₂SO₄, filtered and concentrated under reduced pressure to give a residue. The residue is purified by column chromatography (SiO₂, DCM:MeOH:TEA=100:3:2) TLC (SiO₂, DCM:MeOH=10:1, R_{f}=0.45), then concentrated under reduced pressure to give a residue. Compound 8C (76.0 g, 34.8 mmol, 82.5% yield, 96.0% purity) is obtained as white solid and confirmed via ¹HNMR: EW33072-19-P1C, 400 MHz, MeOD δ 7.13-7.15 (d, J=8.50 Hz, 2H), 6.95-6.97 (dd, J=8.38, 1.13 Hz, 2H), 5.34 (d, J=2.88 Hz, 3H), 0.09 (dd, J=11.26, 3.38 Hz, 3H), 4.64 (d, J=8.50 Hz, 3H), 3.99-4.20 (m, 12H), 3.88-3.98 (m, 5H), 3.66-3.83 (m, 20H), 3.51-3.65 (m, 17H), 3.33-3.50 (m, 9H), 2.87 (t, J=7.63 Hz, 2H), 2.76 (t, J=5.94 Hz, 2H), 2.42-2.50 (m, 10H), 2.14 (s, 9H), 2.03 (s, 9H), 1.94-1.95 (d, J=6.13 Hz, 18H), 1.24-1.26 (d, J=6.75 Hz, 6H), 1.18-1.20 (d, J=6.75 Hz, 6H).

### Example 11: Modification Motif 1

[0324] An example DKK2 siRNA includes a combination of the following modifications:
[0325] Position 9 (from 5′ to 3′) of the sense strand is 2′ F.
[0326] If position 9 is a pyrimidine then all purines in the Sense Strand are 2′OMe, and 1-5 pyrimidines between positions 5 and 11 are 2′ F provided that there are never three 2′F modifications in a row.
[0327] If position 9 is a purine then all pyrimidines in the Sense Strand are 2′OMe, and 1-5 purines between positions 5 and 11 are 2′ F provided that there are never three 2′F modifications in a row.
[0328] Antisense strand odd-numbered positions are 2′OMe and even-numbered positions are a mixture of 2′ F, 2′OMe and 2′ deoxy.

### Example 12: Modification Motif 2

[0329] An example DKK2 siRNA includes a combination of the following modifications:
[0330] Position 9 (from 5′ to 3′) of the sense strand is 2′ deoxy.
[0331] Sense strand positions 5, 7 and 8 are 2′ F.
[0332] All pyrimidines in positions 10-21 are 2′ OMe, and purines are a mixture of 2′ OMe and 2′ F. Alternatively, all purines in positions 10-21 are 2′ OMe and all pyrimidines in positions 10-21 are a mixture of 2′ OMe and 2′ F.
[0333] Antisense strand odd-numbered positions are 2′OMe and even-numbered positions are a mixture of 2′ F, 2′OMe and 2′ deoxy.

[0334] While preferred embodiments of the present invention have been shown and described herein, it will be obvious to those skilled in the art that such embodiments are provided by way of example only. Numerous variations, changes, and substitutions will now occur to those skilled in the art without departing from the invention. It should be understood that various alternatives to the embodiments of the invention described herein may be employed in practicing the invention. It is intended that the following claims define the scope of the invention and that methods and compositions within the scope of these claims and their equivalents be covered thereby.

The application's sequence listing, which the Patent Office published only in electronic form, follows.

SEQUENCE LISTING (7647 sequences)

SEQ ID NO: 1 - RNA, 19 nt, Artificial Sequence
  Description of Artificial Sequence: Synthetic oligonucleotide
agcagagagagagaaagcg

SEQ ID NO: 2 - RNA, 19 nt, Artificial Sequence
  Description of Artificial Sequence: Synthetic oligonucleotide
gcagagagagagaaagcgg

SEQ ID NO: 3 - RNA, 19 nt, Artificial Sequence
  Description of Artificial Sequence: Synthetic oligonucleotide
cagagagagagaaagcggg

SEQ ID NO: 4 - RNA, 19 nt, Artificial Sequence
  Description of Artificial Sequence: Synthetic oligonucleotide
agagagagagaaagcggga

SEQ ID NO: 5 - RNA, 19 nt, Artificial Sequence
  Description of Artificial Sequence: Synthetic oligonucleotide
gagagagagaaagcgggag

SEQ ID NO: 6 - RNA, 19 nt, Artificial Sequence
  Description of Artificial Sequence: Synthetic oligonucleotide
agagagagaaagcgggagc

SEQ ID NO: 7 - RNA, 19 nt, Artificial Sequence
  Description of Artificial Sequence: Synthetic oligonucleotide
gagagagaaagcgggagcc

SEQ ID NO: 8 - RNA, 19 nt, Artificial Sequence
  Description of Artificial Sequence: Synthetic oligonucleotide
agagagaaagcgggagccc

SEQ ID NO: 9 - RNA, 19 nt, Artificial Sequence
  Description of Artificial Sequence: Synthetic oligonucleotide
gagagaaagcgggagcccg

SEQ ID NO: 10 - RNA, 19 nt, Artificial Sequence
  Description of Artificial Sequence: Synthetic oligonucleotide
agagaaagcgggagcccgc

SEQ ID NO: 11 - RNA, 19 nt, Artificial Sequence
  Description of Artificial Sequence: Synthetic oligonucleotide
gagaaagcgggagcccgcg

SEQ ID NO: 12 - RNA, 19 nt, Artificial Sequence
  Description of Artificial Sequence: Synthetic oligonucleotide
agaaagcgggagcccgcgg

SEQ ID NO: 13 - RNA, 19 nt, Artificial Sequence
  Description of Artificial Sequence: Synthetic oligonucleotide
gaaagcgggagcccgcggc

SEQ ID NO: 14 - RNA, 19 nt, Artificial Sequence
  Description of Artificial Sequence: Synthetic oligonucleotide
aaagcgggagcccgcggcg

SEQ ID NO: 15 - RNA, 19 nt, Artificial Sequence
  Description of Artificial Sequence: Synthetic oligonucleotide
aagcgggagcccgcggcga

SEQ ID NO: 16 - RNA, 19 nt, Artificial Sequence
  Description of Artificial Sequence: Synthetic oligonucleotide
agcgggagcccgcggcgag

SEQ ID NO: 17 - RNA, 19 nt, Artificial Sequence
  Description of Artificial Sequence: Synthetic oligonucleotide
gcgggagcccgcggcgagc

SEQ ID NO: 18 - RNA, 19 nt, Artificial Sequence
  Description of Artificial Sequence: Synthetic oligonucleotide
cgggagcccgcggcgagcg

SEQ ID NO: 19 - RNA, 19 nt, Artificial Sequence
  Description of Artificial Sequence: Synthetic oligonucleotide
gggagcccgcggcgagcgu

SEQ ID NO: 20 - RNA, 19 nt, Artificial Sequence
  Description of Artificial Sequence: Synthetic oligonucleotide
ggagcccgcggcgagcgua

SEQ ID NO: 21 - RNA, 19 nt, Artificial Sequence
  Description of Artificial Sequence: Synthetic oligonucleotide
gagcccgcggcgagcguag

SEQ ID NO: 22 - RNA, 19 nt, Artificial Sequence
  Description of Artificial Sequence: Synthetic oligonucleotide
agcccgcggcgagcguagc

SEQ ID NO: 23 - RNA, 19 nt, Artificial Sequence
  Description of Artificial Sequence: Synthetic oligonucleotide
gcccgcggcgagcguagcg

SEQ ID NO: 24 - RNA, 19 nt, Artificial Sequence
  Description of Artificial Sequence: Synthetic oligonucleotide
cccgcggcgagcguagcgc

SEQ ID NO: 25 - RNA, 19 nt, Artificial Sequence
  Description of Artificial Sequence: Synthetic oligonucleotide
ccgcggcgagcguagcgca

SEQ ID NO: 26 - RNA, 19 nt, Artificial Sequence
  Description of Artificial Sequence: Synthetic oligonucleotide
cgcggcgagcguagcgcaa

SEQ ID NO: 27 - RNA, 19 nt, Artificial Sequence
  Description of Artificial Sequence: Synthetic oligonucleotide
gcggcgagcguagcgcaag

SEQ ID NO: 28 - RNA, 19 nt, Artificial Sequence
  Description of Artificial Sequence: Synthetic oligonucleotide
cggcgagcguagcgcaagu

SEQ ID NO: 29 - RNA, 19 nt, Artificial Sequence
  Description of Artificial Sequence: Synthetic oligonucleotide
ggcgagcguagcgcaaguc

SEQ ID NO: 30 - RNA, 19 nt, Artificial Sequence
  Description of Artificial Sequence: Synthetic oligonucleotide
gcgagcguagcgcaagucc

SEQ ID NO: 31 - RNA, 19 nt, Artificial Sequence
  Description of Artificial Sequence: Synthetic oligonucleotide
cgagcguagcgcaaguccg

SEQ ID NO: 32 - RNA, 19 nt, Artificial Sequence
  Description of Artificial Sequence: Synthetic oligonucleotide
gagcguagcgcaaguccgc

SEQ ID NO: 33 - RNA, 19 nt, Artificial Sequence
  Description of Artificial Sequence: Synthetic oligonucleotide
agcguagcgcaaguccgcu

SEQ ID NO: 34 - RNA, 19 nt, Artificial Sequence
  Description of Artificial Sequence: Synthetic oligonucleotide
gcguagcgcaaguccgcuc

SEQ ID NO: 35 - RNA, 19 nt, Artificial Sequence
  Description of Artificial Sequence: Synthetic oligonucleotide
cguagcgcaaguccgcucc

SEQ ID NO: 36 - RNA, 19 nt, Artificial Sequence
  Description of Artificial Sequence: Synthetic oligonucleotide
guagcgcaaguccgcuccc

SEQ ID NO: 37 - RNA, 19 nt, Artificial Sequence
  Description of Artificial Sequence: Synthetic oligonucleotide
uagcgcaaguccgcucccu

SEQ ID NO: 38 - RNA, 19 nt, Artificial Sequence
  Description of Artificial Sequence: Synthetic oligonucleotide
agcgcaaguccgcucccua

SEQ ID NO: 39 - RNA, 19 nt, Artificial Sequence
  Description of Artificial Sequence: Synthetic oligonucleotide
gcgcaaguccgcucccuag

SEQ ID NO: 40 - RNA, 19 nt, Artificial Sequence
  Description of Artificial Sequence: Synthetic oligonucleotide
cgcaaguccgcucccuagg

SEQ ID NO: 41 - RNA, 19 nt, Artificial Sequence
  Description of Artificial Sequence: Synthetic oligonucleotide
gcaaguccgcucccuaggc

SEQ ID NO: 42 - RNA, 19 nt, Artificial Sequence
  Description of Artificial Sequence: Synthetic oligonucleotide
caaguccgcucccuaggca

SEQ ID NO: 43 - RNA, 19 nt, Artificial Sequence
  Description of Artificial Sequence: Synthetic oligonucleotide
aaguccgcucccuaggcau

SEQ ID NO: 44 - RNA, 19 nt, Artificial Sequence
  Description of Artificial Sequence: Synthetic oligonucleotide
aguccgcucccuaggcauc

SEQ ID NO: 45 - RNA, 19 nt, Artificial Sequence
  Description of Artificial Sequence: Synthetic oligonucleotide
guccgcucccuaggcaucg

SEQ ID NO: 46 - RNA, 19 nt, Artificial Sequence
  Description of Artificial Sequence: Synthetic oligonucleotide
uccgcucccuaggcaucgc

SEQ ID NO: 47 - RNA, 19 nt, Artificial Sequence
  Description of Artificial Sequence: Synthetic oligonucleotide
ccgcucccuaggcaucgcu

SEQ ID NO: 48 - RNA, 19 nt, Artificial Sequence
  Description of Artificial Sequence: Synthetic oligonucleotide
cgcucccuaggcaucgcug

SEQ ID NO: 49 - RNA, 19 nt, Artificial Sequence
  Description of Artificial Sequence: Synthetic oligonucleotide
gcucccuaggcaucgcugc

SEQ ID NO: 50 - RNA, 19 nt, Artificial Sequence
  Description of Artificial Sequence: Synthetic oligonucleotide
cucccuaggcaucgcugcg

SEQ ID NO: 51 - RNA, 19 nt, Artificial Sequence
  Description of Artificial Sequence: Synthetic oligonucleotide
ucccuaggcaucgcugcgc

SEQ ID NO: 52 - RNA, 19 nt, Artificial Sequence
  Description of Artificial Sequence: Synthetic oligonucleotide
cccuaggcaucgcugcgcu

SEQ ID NO: 53 - RNA, 19 nt, Artificial Sequence
  Description of Artificial Sequence: Synthetic oligonucleotide
ccuaggcaucgcugcgcug

SEQ ID NO: 54 - RNA, 19 nt, Artificial Sequence
  Description of Artificial Sequence: Synthetic oligonucleotide
cuaggcaucgcugcgcugg

SEQ ID NO: 55 - RNA, 19 nt, Artificial Sequence
  Description of Artificial Sequence: Synthetic oligonucleotide
uaggcaucgcugcgcuggc

SEQ ID NO: 56 - RNA, 19 nt, Artificial Sequence
  Description of Artificial Sequence: Synthetic oligonucleotide
aggcaucgcugcgcuggca

SEQ ID NO: 57 - RNA, 19 nt, Artificial Sequence
  Description of Artificial Sequence: Synthetic oligonucleotide
ggcaucgcugcgcuggcag

SEQ ID NO: 58 - RNA, 19 nt, Artificial Sequence
  Description of Artificial Sequence: Synthetic oligonucleotide
gcaucgcugcgcuggcagc

SEQ ID NO: 59 - RNA, 19 nt, Artificial Sequence
  Description of Artificial Sequence: Synthetic oligonucleotide
caucgcugcgcuggcagcg

SEQ ID NO: 60 - RNA, 19 nt, Artificial Sequence
  Description of Artificial Sequence: Synthetic oligonucleotide
aucgcugcgcuggcagcga

SEQ ID NO: 61 - RNA, 19 nt, Artificial Sequence
  Description of Artificial Sequence: Synthetic oligonucleotide
ucgcugcgcuggcagcgau

SEQ ID NO: 62 - RNA, 19 nt, Artificial Sequence
  Description of Artificial Sequence: Synthetic oligonucleotide
cgcugcgcuggcagcgauu

SEQ ID NO: 63 - RNA, 19 nt, Artificial Sequence
  Description of Artificial Sequence: Synthetic oligonucleotide
gcugcgcuggcagcgauuc

SEQ ID NO: 64 - RNA, 19 nt, Artificial Sequence
  Description of Artificial Sequence: Synthetic oligonucleotide
cugcgcuggcagcgauucg

SEQ ID NO: 65 - RNA, 19 nt, Artificial Sequence
  Description of Artificial Sequence: Synthetic oligonucleotide
ugcgcuggcagcgauucgc

SEQ ID NO: 66 - RNA, 19 nt, Artificial Sequence
  Description of Artificial Sequence: Synthetic oligonucleotide
gcgcuggcagcgauucgcu

SEQ ID NO: 67 - RNA, 19 nt, Artificial Sequence
  Description of Artificial Sequence: Synthetic oligonucleotide
cgcuggcagcgauucgcug

SEQ ID NO: 68 - RNA, 19 nt, Artificial Sequence
  Description of Artificial Sequence: Synthetic oligonucleotide
gcuggcagcgauucgcugu

SEQ ID NO: 69 - RNA, 19 nt, Artificial Sequence
  Description of Artificial Sequence: Synthetic oligonucleotide
cuggcagcgauucgcuguc

SEQ ID NO: 70 - RNA, 19 nt, Artificial Sequence
  Description of Artificial Sequence: Synthetic oligonucleotide
uggcagcgauucgcugucu

SEQ ID NO: 71 - RNA, 19 nt, Artificial Sequence
  Description of Artificial Sequence: Synthetic oligonucleotide
ggcagcgauucgcugucuc

SEQ ID NO: 72 - RNA, 19 nt, Artificial Sequence
  Description of Artificial Sequence: Synthetic oligonucleotide
gcagcgauucgcugucucu

SEQ ID NO: 73 - RNA, 19 nt, Artificial Sequence
  Description of Artificial Sequence: Synthetic oligonucleotide
cagcgauucgcugucucuu

SEQ ID NO: 74 - RNA, 19 nt, Artificial Sequence
  Description of Artificial Sequence: Synthetic oligonucleotide
agcgauucgcugucucuug

SEQ ID NO: 75 - RNA, 19 nt, Artificial Sequence
  Description of Artificial Sequence: Synthetic oligonucleotide
gcgauucgcugucucuugu

SEQ ID NO: 76 - RNA, 19 nt, Artificial Sequence
  Description of Artificial Sequence: Synthetic oligonucleotide
cgauucgcugucucuugug

SEQ ID NO: 77 - RNA, 19 nt, Artificial Sequence
  Description of Artificial Sequence: Synthetic oligonucleotide
gauucgcugucucuuguga

SEQ ID NO: 78 - RNA, 19 nt, Artificial Sequence
  Description of Artificial Sequence: Synthetic oligonucleotide
auucgcugucucuugugag

SEQ ID NO: 79 - RNA, 19 nt, Artificial Sequence
  Description of Artificial Sequence: Synthetic oligonucleotide
uucgcugucucuugugagu

SEQ ID NO: 80 - RNA, 19 nt, Artificial Sequence
  Description of Artificial Sequence: Synthetic oligonucleotide
ucgcugucucuugugaguc

SEQ ID NO: 81 - RNA, 19 nt, Artificial Sequence
  Description of Artificial Sequence: Synthetic oligonucleotide
cgcugucucuugugaguca

SEQ ID NO: 82 - RNA, 19 nt, Artificial Sequence
  Description of Artificial Sequence: Synthetic oligonucleotide
gcugucucuugugagucag

SEQ ID NO: 83 - RNA, 19 nt, Artificial Sequence
  Description of Artificial Sequence: Synthetic oligonucleotide
cugucucuugugagucagg

SEQ ID NO: 84 - RNA, 19 nt, Artificial Sequence
  Description of Artificial Sequence: Synthetic oligonucleotide
ugucucuugugagucaggg

SEQ ID NO: 85 - RNA, 19 nt, Artificial Sequence
  Description of Artificial Sequence: Synthetic oligonucleotide
gucucuugugagucagggg

SEQ ID NO: 86 - RNA, 19 nt, Artificial Sequence
  Description of Artificial Sequence: Synthetic oligonucleotide
ucucuugugagucagggga

SEQ ID NO: 87 - RNA, 19 nt, Artificial Sequence
  Description of Artificial Sequence: Synthetic oligonucleotide
cucuugugagucaggggac

SEQ ID NO: 88 - RNA, 19 nt, Artificial Sequence
  Description of Artificial Sequence: Synthetic oligonucleotide
ucuugugagucaggggaca

SEQ ID NO: 89 - RNA, 19 nt, Artificial Sequence
  Description of Artificial Sequence: Synthetic oligonucleotide
cuugugagucaggggacaa

SEQ ID NO: 90 - RNA, 19 nt, Artificial Sequence
  Description of Artificial Sequence: Synthetic oligonucleotide
uugugagucaggggacaac

SEQ ID NO: 91 - RNA, 19 nt, Artificial Sequence
  Description of Artificial Sequence: Synthetic oligonucleotide
ugugagucaggggacaacg

SEQ ID NO: 92 - RNA, 19 nt, Artificial Sequence
  Description of Artificial Sequence: Synthetic oligonucleotide
gugagucaggggacaacgc

SEQ ID NO: 93 - RNA, 19 nt, Artificial Sequence
  Description of Artificial Sequence: Synthetic oligonucleotide
ugagucaggggacaacgcu

SEQ ID NO: 94 - RNA, 19 nt, Artificial Sequence
  Description of Artificial Sequence: Synthetic oligonucleotide
gagucaggggacaacgcuu

SEQ ID NO: 95 - RNA, 19 nt, Artificial Sequence
  Description of Artificial Sequence: Synthetic oligonucleotide
agucaggggacaacgcuuc

SEQ ID NO: 96 - RNA, 19 nt, Artificial Sequence
  Description of Artificial Sequence: Synthetic oligonucleotide
gucaggggacaacgcuucg

SEQ ID NO: 97 - RNA, 19 nt, Artificial Sequence
  Description of Artificial Sequence: Synthetic oligonucleotide
ucaggggacaacgcuucgg

SEQ ID NO: 98 - RNA, 19 nt, Artificial Sequence
  Description of Artificial Sequence: Synthetic oligonucleotide
caggggacaacgcuucggg

SEQ ID NO: 99 - RNA, 19 nt, Artificial Sequence
  Description of Artificial Sequence: Synthetic oligonucleotide
aggggacaacgcuucgggg

SEQ ID NO: 100 - RNA, 19 nt, Artificial Sequence
  Description of Artificial Sequence: Synthetic oligonucleotide
ggggacaacgcuucggggc

SEQ ID NO: 101 - RNA, 19 nt, Artificial Sequence
  Description of Artificial Sequence: Synthetic oligonucleotide
gggacaacgcuucggggca

SEQ ID NO: 102 - RNA, 19 nt, Artificial Sequence
  Description of Artificial Sequence: Synthetic oligonucleotide
ggacaacgcuucggggcaa

SEQ ID NO: 103 - RNA, 19 nt, Artificial Sequence
  Description of Artificial Sequence: Synthetic oligonucleotide
gacaacgcuucggggcaac

SEQ ID NO: 104 - RNA, 19 nt, Artificial Sequence
  Description of Artificial Sequence: Synthetic oligonucleotide
acaacgcuucggggcaacu

SEQ ID NO: 105 - RNA, 19 nt, Artificial Sequence
  Description of Artificial Sequence: Synthetic oligonucleotide
caacgcuucggggcaacug

SEQ ID NO: 106 - RNA, 19 nt, Artificial Sequence
  Description of Artificial Sequence: Synthetic oligonucleotide
aacgcuucggggcaacugu

SEQ ID NO: 107 - RNA, 19 nt, Artificial Sequence
  Description of Artificial Sequence: Synthetic oligonucleotide
acgcuucggggcaacugug

SEQ ID NO: 108 - RNA, 19 nt, Artificial Sequence
  Description of Artificial Sequence: Synthetic oligonucleotide
cgcuucggggcaacuguga

SEQ ID NO: 109 - RNA, 19 nt, Artificial Sequence
  Description of Artificial Sequence: Synthetic oligonucleotide
gcuucggggcaacugugag

SEQ ID NO: 110 - RNA, 19 nt, Artificial Sequence
  Description of Artificial Sequence: Synthetic oligonucleotide
cuucggggcaacugugagu

SEQ ID NO: 111 - RNA, 19 nt, Artificial Sequence
  Description of Artificial Sequence: Synthetic oligonucleotide
uucggggcaacugugagug

SEQ ID NO: 112 - RNA, 19 nt, Artificial Sequence
  Description of Artificial Sequence: Synthetic oligonucleotide
ucggggcaacugugagugc

SEQ ID NO: 113 - RNA, 19 nt, Artificial Sequence
  Description of Artificial Sequence: Synthetic oligonucleotide
cggggcaacugugagugcg

SEQ ID NO: 114 - RNA, 19 nt, Artificial Sequence
  Description of Artificial Sequence: Synthetic oligonucleotide
ggggcaacugugagugcgc

SEQ ID NO: 115 - RNA, 19 nt, Artificial Sequence
  Description of Artificial Sequence: Synthetic oligonucleotide
gggcaacugugagugcgcg

SEQ ID NO: 116 - RNA, 19 nt, Artificial Sequence
  Description of Artificial Sequence: Synthetic oligonucleotide
ggcaacugugagugcgcgu

SEQ ID NO: 117 - RNA, 19 nt, Artificial Sequence
  Description of Artificial Sequence: Synthetic oligonucleotide
gcaacugugagugcgcgug

SEQ ID NO: 118 - RNA, 19 nt, Artificial Sequence
  Description of Artificial Sequence: Synthetic oligonucleotide
caacugugagugcgcgugu

SEQ ID NO: 119 - RNA, 19 nt, Artificial Sequence
  Description of Artificial Sequence: Synthetic oligonucleotide
aacugugagugcgcgugug

SEQ ID NO: 120 - RNA, 19 nt, Artificial Sequence
  Description of Artificial Sequence: Synthetic oligonucleotide
acugugagugcgcgugugg

SEQ ID NO: 121 - RNA, 19 nt, Artificial Sequence
  Description of Artificial Sequence: Synthetic oligonucleotide
cugugagugcgcguguggg

SEQ ID NO: 122 - RNA, 19 nt, Artificial Sequence
  Description of Artificial Sequence: Synthetic oligonucleotide
ugugagugcgcgugugggg

SEQ ID NO: 123 - RNA, 19 nt, Artificial Sequence
  Description of Artificial Sequence: Synthetic oligonucleotide
gugagugcgcguguggggg

SEQ ID NO: 124 - RNA, 19 nt, Artificial Sequence
  Description of Artificial Sequence: Synthetic oligonucleotide
ugagugcgcguguggggga

SEQ ID NO: 125 - RNA, 19 nt, Artificial Sequence
  Description of Artificial Sequence: Synthetic oligonucleotide
gagugcgcgugugggggac

SEQ ID NO: 126 - RNA, 19 nt, Artificial Sequence
  Description of Artificial Sequence: Synthetic oligonucleotide
agugcgcgugugggggacc

SEQ ID NO: 127 - RNA, 19 nt, Artificial Sequence
  Description of Artificial Sequence: Synthetic oligonucleotide
gugcgcgugugggggaccu

SEQ ID NO: 128 - RNA, 19 nt, Artificial Sequence
  Description of Artificial Sequence: Synthetic oligonucleotide
ugcgcgugugggggaccuc

SEQ ID NO: 129 - RNA, 19 nt, Artificial Sequence
  Description of Artificial Sequence: Synthetic oligonucleotide
gcgcgugugggggaccucg

SEQ ID NO: 130 - RNA, 19 nt, Artificial Sequence
  Description of Artificial Sequence: Synthetic oligonucleotide
cgcgugugggggaccucga

SEQ ID NO: 131 - RNA, 19 nt, Artificial Sequence
  Description of Artificial Sequence: Synthetic oligonucleotide
gcgugugggggaccucgau

SEQ ID NO: 132 - RNA, 19 nt, Artificial Sequence
  Description of Artificial Sequence: Synthetic oligonucleotide
cgugugggggaccucgauu

SEQ ID NO: 133 - RNA, 19 nt, Artificial Sequence
  Description of Artificial Sequence: Synthetic oligonucleotide
gugugggggaccucgauuc

SEQ ID NO: 134 - RNA, 19 nt, Artificial Sequence
  Description of Artificial Sequence: Synthetic oligonucleotide
ugugggggaccucgauucu

SEQ ID NO: 135 - RNA, 19 nt, Artificial Sequence
  Description of Artificial Sequence: Synthetic oligonucleotide
gugggggaccucgauucuc

SEQ ID NO: 136 - RNA, 19 nt, Artificial Sequence
  Description of Artificial Sequence: Synthetic oligonucleotide
ugggggaccucgauucucu

SEQ ID NO: 137 - RNA, 19 nt, Artificial Sequence
  Description of Artificial Sequence: Synthetic oligonucleotide
gggggaccucgauucucuu

SEQ ID NO: 138 - RNA, 19 nt, Artificial Sequence
  Description of Artificial Sequence: Synthetic oligonucleotide
ggggaccucgauucucuuc

SEQ ID NO: 139 - RNA, 19 nt, Artificial Sequence
  Description of Artificial Sequence: Synthetic oligonucleotide
gggaccucgauucucuuca

SEQ ID NO: 140 - RNA, 19 nt, Artificial Sequence
  Description of Artificial Sequence: Synthetic oligonucleotide
ggaccucgauucucuucag

SEQ ID NO: 141 - RNA, 19 nt, Artificial Sequence
  Description of Artificial Sequence: Synthetic oligonucleotide
gaccucgauucucuucaga

SEQ ID NO: 142 - RNA, 19 nt, Artificial Sequence
  Description of Artificial Sequence: Synthetic oligonucleotide
accucgauucucuucagau

SEQ ID NO: 143 - RNA, 19 nt, Artificial Sequence
  Description of Artificial Sequence: Synthetic oligonucleotide
ccucgauucucuucagauc

SEQ ID NO: 144 - RNA, 19 nt, Artificial Sequence
  Description of Artificial Sequence: Synthetic oligonucleotide
cucgauucucuucagaucu

SEQ ID NO: 145 - RNA, 19 nt, Artificial Sequence
  Description of Artificial Sequence: Synthetic oligonucleotide
ucgauucucuucagaucuc

SEQ ID NO: 146 - RNA, 19 nt, Artificial Sequence
  Description of Artificial Sequence: Synthetic oligonucleotide
cgauucucuucagaucucg

SEQ ID NO: 147 - RNA, 19 nt, Artificial Sequence
  Description of Artificial Sequence: Synthetic oligonucleotide
gauucucuucagaucucga

SEQ ID NO: 148 - RNA, 19 nt, Artificial Sequence
  Description of Artificial Sequence: Synthetic oligonucleotide
auucucuucagaucucgag

SEQ ID NO: 149 - RNA, 19 nt, Artificial Sequence
  Description of Artificial Sequence: Synthetic oligonucleotide
uucucuucagaucucgagg

SEQ ID NO: 150 - RNA, 19 nt, Artificial Sequence
  Description of Artificial Sequence: Synthetic oligonucleotide
ucucuucagaucucgagga

SEQ ID NO: 151 - RNA, 19 nt, Artificial Sequence
  Description of Artificial Sequence: Synthetic oligonucleotide
cucuucagaucucgaggau

SEQ ID NO: 152 - RNA, 19 nt, Artificial Sequence
  Description of Artificial Sequence: Synthetic oligonucleotide
ucuucagaucucgaggauu

SEQ ID NO: 153 - RNA, 19 nt, Artificial Sequence
  Description of Artificial Sequence: Synthetic oligonucleotide
cuucagaucucgaggauuc

SEQ ID NO: 154 - RNA, 19 nt, Artificial Sequence
  Description of Artificial Sequence: Synthetic oligonucleotide
uucagaucucgaggauucg

SEQ ID NO: 155 - RNA, 19 nt, Artificial Sequence
  Description of Artificial Sequence: Synthetic oligonucleotide
ucagaucucgaggauucgg

SEQ ID NO: 156 - RNA, 19 nt, Artificial Sequence
  Description of Artificial Sequence: Synthetic oligonucleotide
cagaucucgaggauucggu

SEQ ID NO: 157 - RNA, 19 nt, Artificial Sequence
  Description of Artificial Sequence: Synthetic oligonucleotide
agaucucgaggauucgguc

SEQ ID NO: 158 - RNA, 19 nt, Artificial Sequence
  Description of Artificial Sequence: Synthetic oligonucleotide
gaucucgaggauucggucc

SEQ ID NO: 159 - RNA, 19 nt, Artificial Sequence
  Description of Artificial Sequence: Synthetic oligonucleotide
aucucgaggauucgguccg

SEQ ID NO: 160 - RNA, 19 nt, Artificial Sequence
  Description of Artificial Sequence: Synthetic oligonucleotide
ucucgaggauucgguccgg

SEQ ID NO: 161 - RNA, 19 nt, Artificial Sequence
  Description of Artificial Sequence: Synthetic oligonucleotide
cucgaggauucgguccggg

SEQ ID NO: 162 - RNA, 19 nt, Artificial Sequence
  Description of Artificial Sequence: Synthetic oligonucleotide
ucgaggauucgguccgggg

SEQ ID NO: 163 - RNA, 19 nt, Artificial Sequence
  Description of Artificial Sequence: Synthetic oligonucleotide
cgaggauucgguccgggga

SEQ ID NO: 164 - RNA, 19 nt, Artificial Sequence
  Description of Artificial Sequence: Synthetic oligonucleotide
gaggauucgguccggggac

SEQ ID NO: 165 - RNA, 19 nt, Artificial Sequence
  Description of Artificial Sequence: Synthetic oligonucleotide
aggauucgguccggggacg

SEQ ID NO: 166 - RNA, 19 nt, Artificial Sequence
  Description of Artificial Sequence: Synthetic oligonucleotide
ggauucgguccggggacgu

SEQ ID NO: 167 - RNA, 19 nt, Artificial Sequence
  Description of Artificial Sequence: Synthetic oligonucleotide
gauucgguccggggacguc

SEQ ID NO: 168 - RNA, 19 nt, Artificial Sequence
  Description of Artificial Sequence: Synthetic oligonucleotide
auucgguccggggacgucu

SEQ ID NO: 169 - RNA, 19 nt, Artificial Sequence
  Description of Artificial Sequence: Synthetic oligonucleotide
uucgguccggggacgucuc

SEQ ID NO: 170 - RNA, 19 nt, Artificial Sequence
  Description of Artificial Sequence: Synthetic oligonucleotide
ucgguccggggacgucucc

SEQ ID NO: 171 - RNA, 19 nt, Artificial Sequence
  Description of Artificial Sequence: Synthetic oligonucleotide
cgguccggggacgucuccu

SEQ ID NO: 172 - RNA, 19 nt, Artificial Sequence
  Description of Artificial Sequence: Synthetic oligonucleotide
gguccggggacgucuccug

SEQ ID NO: 173 - RNA, 19 nt, Artificial Sequence
  Description of Artificial Sequence: Synthetic oligonucleotide
guccggggacgucuccuga

SEQ ID NO: 174 - RNA, 19 nt, Artificial Sequence
  Description of Artificial Sequence: Synthetic oligonucleotide
uccggggacgucuccugau

SEQ ID NO: 175 - RNA, 19 nt, Artificial Sequence
  Description of Artificial Sequence: Synthetic oligonucleotide
ccggggacgucuccugauc

SEQ ID NO: 176 - RNA, 19 nt, Artificial Sequence
  Description of Artificial Sequence: Synthetic oligonucleotide
cggggacgucuccugaucc

SEQ ID NO: 177 - RNA, 19 nt, Artificial Sequence
  Description of Artificial Sequence: Synthetic oligonucleotide
ggggacgucuccugauccc

SEQ ID NO: 178 - RNA, 19 nt, Artificial Sequence
  Description of Artificial Sequence: Synthetic oligonucleotide
gggacgucuccugaucccc

SEQ ID NO: 179 - RNA, 19 nt, Artificial Sequence
  Description of Artificial Sequence: Synthetic oligonucleotide
ggacgucuccugauccccu

SEQ ID NO: 180 - RNA, 19 nt, Artificial Sequence
  Description of Artificial Sequence: Synthetic oligonucleotide
gacgucuccugauccccua

SEQ ID NO: 181 - RNA, 19 nt, Artificial Sequence
  Description of Artificial Sequence: Synthetic oligonucleotide
acgucuccugauccccuac

SEQ ID NO: 182 - RNA, 19 nt, Artificial Sequence
  Description of Artificial Sequence: Synthetic oligonucleotide
cgucuccugauccccuacu

SEQ ID NO: 183 - RNA, 19 nt, Artificial Sequence
  Description of Artificial Sequence: Synthetic oligonucleotide
gucuccugauccccuacua

SEQ ID NO: 184 - RNA, 19 nt, Artificial Sequence
  Description of Artificial Sequence: Synthetic oligonucleotide
ucuccugauccccuacuaa

SEQ ID NO: 185 - RNA, 19 nt, Artificial Sequence
  Description of Artificial Sequence: Synthetic oligonucleotide
cuccugauccccuacuaaa

SEQ ID NO: 186 - RNA, 19 nt, Artificial Sequence
  Description of Artificial Sequence: Synthetic oligonucleotide
uccugauccccuacuaaag

SEQ ID NO: 187 - RNA, 19 nt, Artificial Sequence
  Description of Artificial Sequence: Synthetic oligonucleotide
ccugauccccuacuaaagc

SEQ ID NO: 188 - RNA, 19 nt, Artificial Sequence
  Description of Artificial Sequence: Synthetic oligonucleotide
cugauccccuacuaaagcg

SEQ ID NO: 189 - RNA, 19 nt, Artificial Sequence
  Description of Artificial Sequence: Synthetic oligonucleotide
ugauccccuacuaaagcgc

SEQ ID NO: 190 - RNA, 19 nt, Artificial Sequence
  Description of Artificial Sequence: Synthetic oligonucleotide
gauccccuacuaaagcgcc

SEQ ID NO: 191 - RNA, 19 nt, Artificial Sequence
  Description of Artificial Sequence: Synthetic oligonucleotide
auccccuacuaaagcgccu

SEQ ID NO: 192 - RNA, 19 nt, Artificial Sequence
  Description of Artificial Sequence: Synthetic oligonucleotide
uccccuacuaaagcgccug

SEQ ID NO: 193 - RNA, 19 nt, Artificial Sequence
  Description of Artificial Sequence: Synthetic oligonucleotide
ccccuacuaaagcgccugc

SEQ ID NO: 194 - RNA, 19 nt, Artificial Sequence
  Description of Artificial Sequence: Synthetic oligonucleotide
cccuacuaaagcgccugcu

SEQ ID NO: 195 - RNA, 19 nt, Artificial Sequence
  Description of Artificial Sequence: Synthetic oligonucleotide
ccuacuaaagcgccugcua

SEQ ID NO: 196 - RNA, 19 nt, Artificial Sequence
  Description of Artificial Sequence: Synthetic oligonucleotide
cuacuaaagcgccugcuaa

SEQ ID NO: 197 - RNA, 19 nt, Artificial Sequence
  Description of Artificial Sequence: Synthetic oligonucleotide
uacuaaagcgccugcuaac

SEQ ID NO: 198 - RNA, 19 nt, Artificial Sequence
  Description of Artificial Sequence: Synthetic oligonucleotide
acuaaagcgccugcuaacu

SEQ ID NO: 199 - RNA, 19 nt, Artificial Sequence
  Description of Artificial Sequence: Synthetic oligonucleotide
cuaaagcgccugcuaacuu

SEQ ID NO: 200 - RNA, 19 nt, Artificial Sequence
  Description of Artificial Sequence: Synthetic oligonucleotide
uaaagcgccugcuaacuuu

SEQ ID NO: 201 - RNA, 19 nt, Artificial Sequence
  Description of Artificial Sequence: Synthetic oligonucleotide
aaagcgccugcuaacuuug

SEQ ID NO: 202 - RNA, 19 nt, Artificial Sequence
  Description of Artificial Sequence: Synthetic oligonucleotide
aagcgccugcuaacuuuga

SEQ ID NO: 203 - RNA, 19 nt, Artificial Sequence
  Description of Artificial Sequence: Synthetic oligonucleotide
agcgccugcuaacuuugaa

SEQ ID NO: 204 - RNA, 19 nt, Artificial Sequence
  Description of Artificial Sequence: Synthetic oligonucleotide
gcgccugcuaacuuugaaa

SEQ ID NO: 205 - RNA, 19 nt, Artificial Sequence
  Description of Artificial Sequence: Synthetic oligonucleotide
cgccugcuaacuuugaaaa

SEQ ID NO: 206 - RNA, 19 nt, Artificial Sequence
  Description of Artificial Sequence: Synthetic oligonucleotide
gccugcuaacuuugaaaag

SEQ ID NO: 207 - RNA, 19 nt, Artificial Sequence
  Description of Artificial Sequence: Synthetic oligonucleotide
ccugcuaacuuugaaaagg

SEQ ID NO: 208 - RNA, 19 nt, Artificial Sequence
  Description of Artificial Sequence: Synthetic oligonucleotide
cugcuaacuuugaaaagga

SEQ ID NO: 209 - RNA, 19 nt, Artificial Sequence
  Description of Artificial Sequence: Synthetic oligonucleotide
ugcuaacuuugaaaaggag

SEQ ID NO: 210 - RNA, 19 nt, Artificial Sequence
  Description of Artificial Sequence: Synthetic oligonucleotide
gcuaacuuugaaaaggagc

SEQ ID NO: 211 - RNA, 19 nt, Artificial Sequence
  Description of Artificial Sequence: Synthetic oligonucleotide
cuaacuuugaaaaggagca

SEQ ID NO: 212 - RNA, 19 nt, Artificial Sequence
  Description of Artificial Sequence: Synthetic oligonucleotide
uaacuuugaaaaggagcac

SEQ ID NO: 213 - RNA, 19 nt, Artificial Sequence
  Description of Artificial Sequence: Synthetic oligonucleotide
aacuuugaaaaggagcacu

SEQ ID NO: 214 - RNA, 19 nt, Artificial Sequence
  Description of Artificial Sequence: Synthetic oligonucleotide
acuuugaaaaggagcacug

SEQ ID NO: 215 - RNA, 19 nt, Artificial Sequence
  Description of Artificial Sequence: Synthetic oligonucleotide
cuuugaaaaggagcacugu

SEQ ID NO: 216 - RNA, 19 nt, Artificial Sequence
  Description of Artificial Sequence: Synthetic oligonucleotide
uuugaaaaggagcacugug

SEQ ID NO: 217 - RNA, 19 nt, Artificial Sequence
  Description of Artificial Sequence: Synthetic oligonucleotide
uugaaaaggagcacugugu

SEQ ID NO: 218 - RNA, 19 nt, Artificial Sequence
  Description of Artificial Sequence: Synthetic oligonucleotide
ugaaaaggagcacuguguc

SEQ ID NO: 219 - RNA, 19 nt, Artificial Sequence
  Description of Artificial Sequence: Synthetic oligonucleotide
gaaaaggagcacugugucc

SEQ ID NO: 220 - RNA, 19 nt, Artificial Sequence
  Description of Artificial Sequence: Synthetic oligonucleotide
aaaaggagcacuguguccu

SEQ ID NO: 221 - RNA, 19 nt, Artificial Sequence
  Description of Artificial Sequence: Synthetic oligonucleotide
aaaggagcacuguguccug

SEQ ID NO: 222 - RNA, 19 nt, Artificial Sequence
  Description of Artificial Sequence: Synthetic oligonucleotide
aaggagcacuguguccugc

SEQ ID NO: 223 - RNA, 19 nt, Artificial Sequence
  Description of Artificial Sequence: Synthetic oligonucleotide
aggagcacuguguccugca

SEQ ID NO: 224 - RNA, 19 nt, Artificial Sequence
  Description of Artificial Sequence: Synthetic oligonucleotide
ggagcacuguguccugcaa

SEQ ID NO: 225 - RNA, 19 nt, Artificial Sequence
  Description of Artificial Sequence: Synthetic oligonucleotide
gagcacuguguccugcaaa

SEQ ID NO: 226 - RNA, 19 nt, Artificial Sequence
  Description of Artificial Sequence: Synthetic oligonucleotide
agcacuguguccugcaaag

SEQ ID NO: 227 - RNA, 19 nt, Artificial Sequence
  Description of Artificial Sequence: Synthetic oligonucleotide
gcacuguguccugcaaagu

SEQ ID NO: 228 - RNA, 19 nt, Artificial Sequence
  Description of Artificial Sequence: Synthetic oligonucleotide
cacuguguccugcaaaguu

SEQ ID NO: 229 - RNA, 19 nt, Artificial Sequence
  Description of Artificial Sequence: Synthetic oligonucleotide
acuguguccugcaaaguuu

SEQ ID NO: 230 - RNA, 19 nt, Artificial Sequence
  Description of Artificial Sequence: Synthetic oligonucleotide
cuguguccugcaaaguuug

SEQ ID NO: 231 - RNA, 19 nt, Artificial Sequence
  Description of Artificial Sequence: Synthetic oligonucleotide
uguguccugcaaaguuuga

SEQ ID NO: 232 - RNA, 19 nt, Artificial Sequence
  Description of Artificial Sequence: Synthetic oligonucleotide
guguccugcaaaguuugac

SEQ ID NO: 233 - RNA, 19 nt, Artificial Sequence
  Description of Artificial Sequence: Synthetic oligonucleotide
uguccugcaaaguuugaca

SEQ ID NO: 234 - RNA, 19 nt, Artificial Sequence
  Description of Artificial Sequence: Synthetic oligonucleotide
guccugcaaaguuugacac

SEQ ID NO: 235 - RNA, 19 nt, Artificial Sequence
  Description of Artificial Sequence: Synthetic oligonucleotide
uccugcaaaguuugacaca

SEQ ID NO: 236 - RNA, 19 nt, Artificial Sequence
  Description of Artificial Sequence: Synthetic oligonucleotide
ccugcaaaguuugacacau

SEQ ID NO: 237 - RNA, 19 nt, Artificial Sequence
  Description of Artificial Sequence: Synthetic oligonucleotide
cugcaaaguuugacacaua

SEQ ID NO: 238 - RNA, 19 nt, Artificial Sequence
  Description of Artificial Sequence: Synthetic oligonucleotide
ugcaaaguuugacacauaa

SEQ ID NO: 239 - RNA, 19 nt, Artificial Sequence
  Description of Artificial Sequence: Synthetic oligonucleotide
gcaaaguuugacacauaaa

SEQ ID NO: 240 - RNA, 19 nt, Artificial Sequence
  Description of Artificial Sequence: Synthetic oligonucleotide
caaaguuugacacauaaag

SEQ ID NO: 241 - RNA, 19 nt, Artificial Sequence
  Description of Artificial Sequence: Synthetic oligonucleotide
aaaguuugacacauaaagg

SEQ ID NO: 242 - RNA, 19 nt, Artificial Sequence
  Description of Artificial Sequence: Synthetic oligonucleotide
aaguuugacacauaaagga

SEQ ID NO: 243 - RNA, 19 nt, Artificial Sequence
  Description of Artificial Sequence: Synthetic oligonucleotide
aguuugacacauaaaggau

SEQ ID NO: 244 - RNA, 19 nt, Artificial Sequence
  Description of Artificial Sequence: Synthetic oligonucleotide
guuugacacauaaaggaua

SEQ ID NO: 245 - RNA, 19 nt, Artificial Sequence
  Description of Artificial Sequence: Synthetic oligonucleotide
uuugacacauaaaggauag

SEQ ID NO: 246 - RNA, 19 nt, Artificial Sequence
  Description of Artificial Sequence: Synthetic oligonucleotide
uugacacauaaaggauagg

SEQ ID NO: 247 - RNA, 19 nt, Artificial Sequence
  Description of Artificial Sequence: Synthetic oligonucleotide
ugacacauaaaggauagga

SEQ ID NO: 248 - RNA, 19 nt, Artificial Sequence
  Description of Artificial Sequence: Synthetic oligonucleotide
gacacauaaaggauaggaa

SEQ ID NO: 249 - RNA, 19 nt, Artificial Sequence
  Description of Artificial Sequence: Synthetic oligonucleotide
acacauaaaggauaggaaa

SEQ ID NO: 250 - RNA, 19 nt, Artificial Sequence
  Description of Artificial Sequence: Synthetic oligonucleotide
cacauaaaggauaggaaaa

SEQ ID NO: 251 - RNA, 19 nt, Artificial Sequence
  Description of Artificial Sequence: Synthetic oligonucleotide
acauaaaggauaggaaaag

SEQ ID NO: 252 - RNA, 19 nt, Artificial Sequence
  Description of Artificial Sequence: Synthetic oligonucleotide
cauaaaggauaggaaaaga

SEQ ID NO: 253 - RNA, 19 nt, Artificial Sequence
  Description of Artificial Sequence: Synthetic oligonucleotide
auaaaggauaggaaaagag

SEQ ID NO: 254 - RNA, 19 nt, Artificial Sequence
  Description of Artificial Sequence: Synthetic oligonucleotide
uaaaggauaggaaaagaga

SEQ ID NO: 255 - RNA, 19 nt, Artificial Sequence
  Description of Artificial Sequence: Synthetic oligonucleotide
aaaggauaggaaaagagag

SEQ ID NO: 256 - RNA, 19 nt, Artificial Sequence
  Description of Artificial Sequence: Synthetic oligonucleotide
aaggauaggaaaagagagg

SEQ ID NO: 257 - RNA, 19 nt, Artificial Sequence
  Description of Artificial Sequence: Synthetic oligonucleotide
aggauaggaaaagagagga

SEQ ID NO: 258 - RNA, 19 nt, Artificial Sequence
  Description of Artificial Sequence: Synthetic oligonucleotide
ggauaggaaaagagaggag

SEQ ID NO: 259 - RNA, 19 nt, Artificial Sequence
  Description of Artificial Sequence: Synthetic oligonucleotide
gauaggaaaagagaggaga

SEQ ID NO: 260 - RNA, 19 nt, Artificial Sequence
  Description of Artificial Sequence: Synthetic oligonucleotide
auaggaaaagagaggagag

SEQ ID NO: 261 - RNA, 19 nt, Artificial Sequence
  Description of Artificial Sequence: Synthetic oligonucleotide
uaggaaaagagaggagaga

SEQ ID NO: 262 - RNA, 19 nt, Artificial Sequence
  Description of Artificial Sequence: Synthetic oligonucleotide
aggaaaagagaggagagaa

SEQ ID NO: 263 - RNA, 19 nt, Artificial Sequence
  Description of Artificial Sequence: Synthetic oligonucleotide
ggaaaagagaggagagaaa

SEQ ID NO: 264 - RNA, 19 nt, Artificial Sequence
  Description of Artificial Sequence: Synthetic oligonucleotide
gaaaagagaggagagaaaa

SEQ ID NO: 265 - RNA, 19 nt, Artificial Sequence
  Description of Artificial Sequence: Synthetic oligonucleotide
aaaagagaggagagaaaag

SEQ ID NO: 266 - RNA, 19 nt, Artificial Sequence
  Description of Artificial Sequence: Synthetic oligonucleotide
aaagagaggagagaaaagc

SEQ ID NO: 267 - RNA, 19 nt, Artificial Sequence
  Description of Artificial Sequence: Synthetic oligonucleotide
aagagaggagagaaaagca

SEQ ID NO: 268 - RNA, 19 nt, Artificial Sequence
  Description of Artificial Sequence: Synthetic oligonucleotide
agagaggagagaaaagcaa

SEQ ID NO: 269 - RNA, 19 nt, Artificial Sequence
  Description of Artificial Sequence: Synthetic oligonucleotide
gagaggagagaaaagcaac

SEQ ID NO: 270 - RNA, 19 nt, Artificial Sequence
  Description of Artificial Sequence: Synthetic oligonucleotide
agaggagagaaaagcaacu

SEQ ID NO: 271 - RNA, 19 nt, Artificial Sequence
  Description of Artificial Sequence: Synthetic oligonucleotide
gaggagagaaaagcaacug

SEQ ID NO: 272 - RNA, 19 nt, Artificial Sequence
  Description of Artificial Sequence: Synthetic oligonucleotide
aggagagaaaagcaacuga

SEQ ID NO: 273 - RNA, 19 nt, Artificial Sequence
  Description of Artificial Sequence: Synthetic oligonucleotide
ggagagaaaagcaacugag

SEQ ID NO: 274 - RNA, 19 nt, Artificial Sequence
  Description of Artificial Sequence: Synthetic oligonucleotide
gagagaaaagcaacugagu

SEQ ID NO: 275 - RNA, 19 nt, Artificial Sequence
  Description of Artificial Sequence: Synthetic oligonucleotide
agagaaaagcaacugaguu

SEQ ID NO: 276 - RNA, 19 nt, Artificial Sequence
  Description of Artificial Sequence: Synthetic oligonucleotide
gagaaaagcaacugaguug

SEQ ID NO: 277 - RNA, 19 nt, Artificial Sequence
  Description of Artificial Sequence: Synthetic oligonucleotide
agaaaagcaacugaguuga

SEQ ID NO: 278 - RNA, 19 nt, Artificial Sequence
  Description of Artificial Sequence: Synthetic oligonucleotide
gaaaagcaacugaguugaa

SEQ ID NO: 279 - RNA, 19 nt, Artificial Sequence
  Description of Artificial Sequence: Synthetic oligonucleotide
aaaagcaacugaguugaag

SEQ ID NO: 280 - RNA, 19 nt, Artificial Sequence
  Description of Artificial Sequence: Synthetic oligonucleotide
aaagcaacugaguugaagg

SEQ ID NO: 281 - RNA, 19 nt, Artificial Sequence
  Description of Artificial Sequence: Synthetic oligonucleotide
aagcaacugaguugaagga

SEQ ID NO: 282 - RNA, 19 nt, Artificial Sequence
  Description of Artificial Sequence: Synthetic oligonucleotide
agcaacugaguugaaggag

SEQ ID NO: 283 - RNA, 19 nt, Artificial Sequence
  Description of Artificial Sequence: Synthetic oligonucleotide
gcaacugaguugaaggaga

SEQ ID NO: 284 - RNA, 19 nt, Artificial Sequence
  Description of Artificial Sequence: Synthetic oligonucleotide
caacugaguugaaggagaa

SEQ ID NO: 285 - RNA, 19 nt, Artificial Sequence
  Description of Artificial Sequence: Synthetic oligonucleotide
aacugaguugaaggagaag

SEQ ID NO: 286 - RNA, 19 nt, Artificial Sequence
  Description of Artificial Sequence: Synthetic oligonucleotide
acugaguugaaggagaagg

SEQ ID NO: 287 - RNA, 19 nt, Artificial Sequence
  Description of Artificial Sequence: Synthetic oligonucleotide
cugaguugaaggagaagga

SEQ ID NO: 288 - RNA, 19 nt, Artificial Sequence
  Description of Artificial Sequence: Synthetic oligonucleotide
ugaguugaaggagaaggag

SEQ ID NO: 289 - RNA, 19 nt, Artificial Sequence
  Description of Artificial Sequence: Synthetic oligonucleotide
gaguugaaggagaaggagc

SEQ ID NO: 290 - RNA, 19 nt, Artificial Sequence
  Description of Artificial Sequence: Synthetic oligonucleotide
aguugaaggagaaggagcu

SEQ ID NO: 291 - RNA, 19 nt, Artificial Sequence
  Description of Artificial Sequence: Synthetic oligonucleotide
guugaaggagaaggagcug

SEQ ID NO: 292 - RNA, 19 nt, Artificial Sequence
  Description of Artificial Sequence: Synthetic oligonucleotide
uugaaggagaaggagcuga

SEQ ID NO: 293 - RNA, 19 nt, Artificial Sequence
  Description of Artificial Sequence: Synthetic oligonucleotide
ugaaggagaaggagcugau

SEQ ID NO: 294 - RNA, 19 nt, Artificial Sequence
  Description of Artificial Sequence: Synthetic oligonucleotide
gaaggagaaggagcugaug

SEQ ID NO: 295 - RNA, 19 nt, Artificial Sequence
  Description of Artificial Sequence: Synthetic oligonucleotide
aaggagaaggagcugaugc

SEQ ID NO: 296 - RNA, 19 nt, Artificial Sequence
  Description of Artificial Sequence: Synthetic oligonucleotide
aggagaaggagcugaugcg

SEQ ID NO: 297 - RNA, 19 nt, Artificial Sequence
  Description of Artificial Sequence: Synthetic oligonucleotide
ggagaaggagcugaugcgg

SEQ ID NO: 298 - RNA, 19 nt, Artificial Sequence
  Description of Artificial Sequence: Synthetic oligonucleotide
gagaaggagcugaugcggg

SEQ ID NO: 299 - RNA, 19 nt, Artificial Sequence
  Description of Artificial Sequence: Synthetic oligonucleotide
agaaggagcugaugcgggc

SEQ ID NO: 300 - RNA, 19 nt, Artificial Sequence
  Description of Artificial Sequence: Synthetic oligonucleotide
gaaggagcugaugcgggcc

SEQ ID NO: 301 - RNA, 19 nt, Artificial Sequence
  Description of Artificial Sequence: Synthetic oligonucleotide
aaggagcugaugcgggccu

SEQ ID NO: 302 - RNA, 19 nt, Artificial Sequence
  Description of Artificial Sequence: Synthetic oligonucleotide
aggagcugaugcgggccuc

SEQ ID NO: 303 - RNA, 19 nt, Artificial Sequence
  Description of Artificial Sequence: Synthetic oligonucleotide
ggagcugaugcgggccucc

SEQ ID NO: 304 - RNA, 19 nt, Artificial Sequence
  Description of Artificial Sequence: Synthetic oligonucleotide
gagcugaugcgggccuccu

SEQ ID NO: 305 - RNA, 19 nt, Artificial Sequence
  Description of Artificial Sequence: Synthetic oligonucleotide
agcugaugcgggccuccug

SEQ ID NO: 306 - RNA, 19 nt, Artificial Sequence
  Description of Artificial Sequence: Synthetic oligonucleotide
gcugaugcgggccuccuga

SEQ ID NO: 307 - RNA, 19 nt, Artificial Sequence
  Description of Artificial Sequence: Synthetic oligonucleotide
cugaugcgggccuccugau

SEQ ID NO: 308 - RNA, 19 nt, Artificial Sequence
  Description of Artificial Sequence: Synthetic oligonucleotide
ugaugcgggccuccugauc

SEQ ID NO: 309 - RNA, 19 nt, Artificial Sequence
  Description of Artificial Sequence: Synthetic oligonucleotide
gaugcgggccuccugauca

SEQ ID NO: 310 - RNA, 19 nt, Artificial Sequence
  Description of Artificial Sequence: Synthetic oligonucleotide
augcgggccuccugaucaa

SEQ ID NO: 311 - RNA, 19 nt, Artificial Sequence
  Description of Artificial Sequence: Synthetic oligonucleotide
ugcgggccuccugaucaau

SEQ ID NO: 312 - RNA, 19 nt, Artificial Sequence
  Description of Artificial Sequence: Synthetic oligonucleotide
gcgggccuccugaucaauu

SEQ ID NO: 313 - RNA, 19 nt, Artificial Sequence
  Description of Artificial Sequence: Synthetic oligonucleotide
cgggccuccugaucaauua

SEQ ID NO: 314 - RNA, 19 nt, Artificial Sequence
  Description of Artificial Sequence: Synthetic oligonucleotide
gggccuccugaucaauuaa

SEQ ID NO: 315 - RNA, 19 nt, Artificial Sequence
  Description of Artificial Sequence: Synthetic oligonucleotide
ggccuccugaucaauuaag

SEQ ID NO: 316 - RNA, 19 nt, Artificial Sequence
  Description of Artificial Sequence: Synthetic oligonucleotide
gccuccugaucaauuaaga

SEQ ID NO: 317 - RNA, 19 nt, Artificial Sequence
  Description of Artificial Sequence: Synthetic oligonucleotide
ccuccugaucaauuaagag

SEQ ID NO: 318 - RNA, 19 nt, Artificial Sequence
  Description of Artificial Sequence: Synthetic oligonucleotide
cuccugaucaauuaagagg

SEQ ID NO: 319 - RNA, 19 nt, Artificial Sequence
  Description of Artificial Sequence: Synthetic oligonucleotide
uccugaucaauuaagagga

SEQ ID NO: 320 - RNA, 19 nt, Artificial Sequence
  Description of Artificial Sequence: Synthetic oligonucleotide
ccugaucaauuaagaggag

SEQ ID NO: 321 - RNA, 19 nt, Artificial Sequence
  Description of Artificial Sequence: Synthetic oligonucleotide
cugaucaauuaagaggaga

SEQ ID NO: 322 - RNA, 19 nt, Artificial Sequence
  Description of Artificial Sequence: Synthetic oligonucleotide
ugaucaauuaagaggagag

SEQ ID NO: 323 - RNA, 19 nt, Artificial Sequence
  Description of Artificial Sequence: Synthetic oligonucleotide
gaucaauuaagaggagagu

SEQ ID NO: 324 - RNA, 19 nt, Artificial Sequence
  Description of Artificial Sequence: Synthetic oligonucleotide
aucaauuaagaggagaguu

SEQ ID NO: 325 - RNA, 19 nt, Artificial Sequence
  Description of Artificial Sequence: Synthetic oligonucleotide
ucaauuaagaggagaguua

SEQ ID NO: 326 - RNA, 19 nt, Artificial Sequence
  Description of Artificial Sequence: Synthetic oligonucleotide
caauuaagaggagaguuaa

SEQ ID NO: 327 - RNA, 19 nt, Artificial Sequence
  Description of Artificial Sequence: Synthetic oligonucleotide
aauuaagaggagaguuaaa

SEQ ID NO: 328 - RNA, 19 nt, Artificial Sequence
  Description of Artificial Sequence: Synthetic oligonucleotide
auuaagaggagaguuaaac

SEQ ID NO: 329 - RNA, 19 nt, Artificial Sequence
  Description of Artificial Sequence: Synthetic oligonucleotide
uuaagaggagaguuaaacc

SEQ ID NO: 330 - RNA, 19 nt, Artificial Sequence
  Description of Artificial Sequence: Synthetic oligonucleotide
uaagaggagaguuaaaccg

SEQ ID NO: 331 - RNA, 19 nt, Artificial Sequence
  Description of Artificial Sequence: Synthetic oligonucleotide
aagaggagaguuaaaccgc

SEQ ID NO: 332 - RNA, 19 nt, Artificial Sequence
  Description of Artificial Sequence: Synthetic oligonucleotide
agaggagaguuaaaccgcc

SEQ ID NO: 333 - RNA, 19 nt, Artificial Sequence
  Description of Artificial Sequence: Synthetic oligonucleotide
gaggagaguuaaaccgccg

SEQ ID NO: 334 - RNA, 19 nt, Artificial Sequence
  Description of Artificial Sequence: Synthetic oligonucleotide
aggagaguuaaaccgccga

SEQ ID NO: 335 - RNA, 19 nt, Artificial Sequence
  Description of Artificial Sequence: Synthetic oligonucleotide
ggagaguuaaaccgccgag

SEQ ID NO: 336 - RNA, 19 nt, Artificial Sequence
  Description of Artificial Sequence: Synthetic oligonucleotide
gagaguuaaaccgccgaga

SEQ ID NO: 337 - RNA, 19 nt, Artificial Sequence
  Description of Artificial Sequence: Synthetic oligonucleotide
agaguuaaaccgccgagau

SEQ ID NO: 338 - RNA, 19 nt, Artificial Sequence
  Description of Artificial Sequence: Synthetic oligonucleotide
gaguuaaaccgccgagauc

SEQ ID NO: 339 - RNA, 19 nt, Artificial Sequence
  Description of Artificial Sequence: Synthetic oligonucleotide
aguuaaaccgccgagaucc

SEQ ID NO: 340 - RNA, 19 nt, Artificial Sequence
  Description of Artificial Sequence: Synthetic oligonucleotide
guuaaaccgccgagauccc

SEQ ID NO: 341 - RNA, 19 nt, Artificial Sequence
  Description of Artificial Sequence: Synthetic oligonucleotide
uuaaaccgccgagaucccg

SEQ ID NO: 342 - RNA, 19 nt, Artificial Sequence
  Description of Artificial Sequence: Synthetic oligonucleotide
uaaaccgccgagaucccgg

SEQ ID NO: 343 - RNA, 19 nt, Artificial Sequence
  Description of Artificial Sequence: Synthetic oligonucleotide
aaaccgccgagaucccggc

SEQ ID NO: 344 - RNA, 19 nt, Artificial Sequence
  Description of Artificial Sequence: Synthetic oligonucleotide
aaccgccgagaucccggcg

SEQ ID NO: 345 - RNA, 19 nt, Artificial Sequence
  Description of Artificial Sequence: Synthetic oligonucleotide
accgccgagaucccggcgg

SEQ ID NO: 346 - RNA, 19 nt, Artificial Sequence
  Description of Artificial Sequence: Synthetic oligonucleotide
ccgccgagaucccggcggg

SEQ ID NO: 347 - RNA, 19 nt, Artificial Sequence
  Description of Artificial Sequence: Synthetic oligonucleotide
cgccgagaucccggcggga

SEQ ID NO: 348 - RNA, 19 nt, Artificial Sequence
  Description of Artificial Sequence: Synthetic oligonucleotide
gccgagaucccggcgggac

SEQ ID NO: 349 - RNA, 19 nt, Artificial Sequence
  Description of Artificial Sequence: Synthetic oligonucleotide
ccgagaucccggcgggacc

SEQ ID NO: 350 - RNA, 19 nt, Artificial Sequence
  Description of Artificial Sequence: Synthetic oligonucleotide
cgagaucccggcgggacca

SEQ ID NO: 351 - RNA, 19 nt, Artificial Sequence
  Description of Artificial Sequence: Synthetic oligonucleotide
gagaucccggcgggaccaa

SEQ ID NO: 352 - RNA, 19 nt, Artificial Sequence
  Description of Artificial Sequence: Synthetic oligonucleotide
agaucccggcgggaccaag

SEQ ID NO: 353 - RNA, 19 nt, Artificial Sequence
  Description of Artificial Sequence: Synthetic oligonucleotide
gaucccggcgggaccaagg

SEQ ID NO: 354 - RNA, 19 nt, Artificial Sequence
  Description of Artificial Sequence: Synthetic oligonucleotide
aucccggcgggaccaagga

SEQ ID NO: 355 - RNA, 19 nt, Artificial Sequence
  Description of Artificial Sequence: Synthetic oligonucleotide
ucccggcgggaccaaggag

SEQ ID NO: 356 - RNA, 19 nt, Artificial Sequence
  Description of Artificial Sequence: Synthetic oligonucleotide
cccggcgggaccaaggagg

SEQ ID NO: 357 - RNA, 19 nt, Artificial Sequence
  Description of Artificial Sequence: Synthetic oligonucleotide
ccggcgggaccaaggaggu

SEQ ID NO: 358 - RNA, 19 nt, Artificial Sequence
  Description of Artificial Sequence: Synthetic oligonucleotide
cggcgggaccaaggaggug

SEQ ID NO: 359 - RNA, 19 nt, Artificial Sequence
  Description of Artificial Sequence: Synthetic oligonucleotide
ggcgggaccaaggaggugc

SEQ ID NO: 360 - RNA, 19 nt, Artificial Sequence
  Description of Artificial Sequence: Synthetic oligonucleotide
gcgggaccaaggaggugcg

SEQ ID NO: 361 - RNA, 19 nt, Artificial Sequence
  Description of Artificial Sequence: Synthetic oligonucleotide
cgggaccaaggaggugcgg

SEQ ID NO: 362 - RNA, 19 nt, Artificial Sequence
  Description of Artificial Sequence: Synthetic oligonucleotide
gggaccaaggaggugcggg

SEQ ID NO: 363 - RNA, 19 nt, Artificial Sequence
  Description of Artificial Sequence: Synthetic oligonucleotide
ggaccaaggaggugcgggg

SEQ ID NO: 364 - RNA, 19 nt, Artificial Sequence
  Description of Artificial Sequence: Synthetic oligonucleotide
gaccaaggaggugcggggc

SEQ ID NO: 365 - RNA, 19 nt, Artificial Sequence
  Description of Artificial Sequence: Synthetic oligonucleotide
accaaggaggugcggggca

SEQ ID NO: 366 - RNA, 19 nt, Artificial Sequence
  Description of Artificial Sequence: Synthetic oligonucleotide
ccaaggaggugcggggcaa

SEQ ID NO: 367 - RNA, 19 nt, Artificial Sequence
  Description of Artificial Sequence: Synthetic oligonucleotide
caaggaggugcggggcaag

SEQ ID NO: 368 - RNA, 19 nt, Artificial Sequence
  Description of Artificial Sequence: Synthetic oligonucleotide
aaggaggugcggggcaaga

SEQ ID NO: 369 - RNA, 19 nt, Artificial Sequence
  Description of Artificial Sequence: Synthetic oligonucleotide
aggaggugcggggcaagaa

SEQ ID NO: 370 - RNA, 19 nt, Artificial Sequence
  Description of Artificial Sequence: Synthetic oligonucleotide
ggaggugcggggcaagaag

SEQ ID NO: 371 - RNA, 19 nt, Artificial Sequence
  Description of Artificial Sequence: Synthetic oligonucleotide
gaggugcggggcaagaagg

SEQ ID NO: 372 - RNA, 19 nt, Artificial Sequence
  Description of Artificial Sequence: Synthetic oligonucleotide
aggugcggggcaagaagga

SEQ ID NO: 373 - RNA, 19 nt, Artificial Sequence
  Description of Artificial Sequence: Synthetic oligonucleotide
ggugcggggcaagaaggaa

SEQ ID NO: 374 - RNA, 19 nt, Artificial Sequence
  Description of Artificial Sequence: Synthetic oligonucleotide
gugcggggcaagaaggaac

SEQ ID NO: 375 - RNA, 19 nt, Artificial Sequence
  Description of Artificial Sequence: Synthetic oligonucleotide
ugcggggcaagaaggaacg

SEQ ID NO: 376 - RNA, 19 nt, Artificial Sequence
  Description of Artificial Sequence: Synthetic oligonucleotide
gcggggcaagaaggaacgg

SEQ ID NO: 377 - RNA, 19 nt, Artificial Sequence
  Description of Artificial Sequence: Synthetic oligonucleotide
cggggcaagaaggaacgga

SEQ ID NO: 378 - RNA, 19 nt, Artificial Sequence
  Description of Artificial Sequence: Synthetic oligonucleotide
ggggcaagaaggaacggaa

SEQ ID NO: 379 - RNA, 19 nt, Artificial Sequence
  Description of Artificial Sequence: Synthetic oligonucleotide
gggcaagaaggaacggaag

SEQ ID NO: 380 - RNA, 19 nt, Artificial Sequence
  Description of Artificial Sequence: Synthetic oligonucleotide
ggcaagaaggaacggaagc

SEQ ID NO: 381 - RNA, 19 nt, Artificial Sequence
  Description of Artificial Sequence: Synthetic oligonucleotide
gcaagaaggaacggaagcg

SEQ ID NO: 382 - RNA, 19 nt, Artificial Sequence
  Description of Artificial Sequence: Synthetic oligonucleotide
caagaaggaacggaagcgg

SEQ ID NO: 383 - RNA, 19 nt, Artificial Sequence
  Description of Artificial Sequence: Synthetic oligonucleotide
aagaaggaacggaagcggu

SEQ ID NO: 384 - RNA, 19 nt, Artificial Sequence
  Description of Artificial Sequence: Synthetic oligonucleotide
agaaggaacggaagcggug

SEQ ID NO: 385 - RNA, 19 nt, Artificial Sequence
  Description of Artificial Sequence: Synthetic oligonucleotide
gaaggaacggaagcggugc

SEQ ID NO: 386 - RNA, 19 nt, Artificial Sequence
  Description of Artificial Sequence: Synthetic oligonucleotide
aaggaacggaagcggugcg

SEQ ID NO: 387 - RNA, 19 nt, Artificial Sequence
  Description of Artificial Sequence: Synthetic oligonucleotide
aggaacggaagcggugcga

SEQ ID NO: 388 - RNA, 19 nt, Artificial Sequence
  Description of Artificial Sequence: Synthetic oligonucleotide
ggaacggaagcggugcgau

SEQ ID NO: 389 - RNA, 19 nt, Artificial Sequence
  Description of Artificial Sequence: Synthetic oligonucleotide
gaacggaagcggugcgauc

SEQ ID NO: 390 - RNA, 19 nt, Artificial Sequence
  Description of Artificial Sequence: Synthetic oligonucleotide
aacggaagcggugcgaucc

SEQ ID NO: 391 - RNA, 19 nt, Artificial Sequence
  Description of Artificial Sequence: Synthetic oligonucleotide
acggaagcggugcgaucca

SEQ ID NO: 392 - RNA, 19 nt, Artificial Sequence
  Description of Artificial Sequence: Synthetic oligonucleotide
cggaagcggugcgauccac

SEQ ID NO: 393 - RNA, 19 nt, Artificial Sequence
  Description of Artificial Sequence: Synthetic oligonucleotide
ggaagcggugcgauccaca

SEQ ID NO: 394 - RNA, 19 nt, Artificial Sequence
  Description of Artificial Sequence: Synthetic oligonucleotide
gaagcggugcgauccacag

SEQ ID NO: 395 - RNA, 19 nt, Artificial Sequence
  Description of Artificial Sequence: Synthetic oligonucleotide
aagcggugcgauccacagg

SEQ ID NO: 396 - RNA, 19 nt, Artificial Sequence
  Description of Artificial Sequence: Synthetic oligonucleotide
agcggugcgauccacaggg

SEQ ID NO: 397 - RNA, 19 nt, Artificial Sequence
  Description of Artificial Sequence: Synthetic oligonucleotide
gcggugcgauccacagggc

SEQ ID NO: 398 - RNA, 19 nt, Artificial Sequence
  Description of Artificial Sequence: Synthetic oligonucleotide
cggugcgauccacagggcu

SEQ ID NO: 399 - RNA, 19 nt, Artificial Sequence
  Description of Artificial Sequence: Synthetic oligonucleotide
ggugcgauccacagggcug

SEQ ID NO: 400 - RNA, 19 nt, Artificial Sequence
  Description of Artificial Sequence: Synthetic oligonucleotide
gugcgauccacagggcugg

SEQ ID NO: 401 - RNA, 19 nt, Artificial Sequence
  Description of Artificial Sequence: Synthetic oligonucleotide
ugcgauccacagggcuggg

SEQ ID NO: 402 - RNA, 19 nt, Artificial Sequence
  Description of Artificial Sequence: Synthetic oligonucleotide
gcgauccacagggcugggu

SEQ ID NO: 403 - RNA, 19 nt, Artificial Sequence
  Description of Artificial Sequence: Synthetic oligonucleotide
cgauccacagggcuggguu

SEQ ID NO: 404 - RNA, 19 nt, Artificial Sequence
  Description of Artificial Sequence: Synthetic oligonucleotide
gauccacagggcuggguuu

SEQ ID NO: 405 - RNA, 19 nt, Artificial Sequence
  Description of Artificial Sequence: Synthetic oligonucleotide
auccacagggcuggguuuu

SEQ ID NO: 406 - RNA, 19 nt, Artificial Sequence
  Description of Artificial Sequence: Synthetic oligonucleotide
uccacagggcuggguuuuc

SEQ ID NO: 407 - RNA, 19 nt, Artificial Sequence
  Description of Artificial Sequence: Synthetic oligonucleotide
ccacagggcuggguuuucu

SEQ ID NO: 408 - RNA, 19 nt, Artificial Sequence
  Description of Artificial Sequence: Synthetic oligonucleotide
cacagggcuggguuuucuu

SEQ ID NO: 409 - RNA, 19 nt, Artificial Sequence
  Description of Artificial Sequence: Synthetic oligonucleotide
acagggcuggguuuucuug

SEQ ID NO: 410 - RNA, 19 nt, Artificial Sequence
  Description of Artificial Sequence: Synthetic oligonucleotide
cagggcuggguuuucuugc

SEQ ID NO: 411 - RNA, 19 nt, Artificial Sequence
  Description of Artificial Sequence: Synthetic oligonucleotide
agggcuggguuuucuugca

SEQ ID NO: 412 - RNA, 19 nt, Artificial Sequence
  Description of Artificial Sequence: Synthetic oligonucleotide
gggcuggguuuucuugcac

SEQ ID NO: 413 - RNA, 19 nt, Artificial Sequence
  Description of Artificial Sequence: Synthetic oligonucleotide
ggcuggguuuucuugcacc

SEQ ID NO: 414 - RNA, 19 nt, Artificial Sequence
  Description of Artificial Sequence: Synthetic oligonucleotide
gcuggguuuucuugcaccu

SEQ ID NO: 415 - RNA, 19 nt, Artificial Sequence
  Description of Artificial Sequence: Synthetic oligonucleotide
cuggguuuucuugcaccuu

SEQ ID NO: 416 - RNA, 19 nt, Artificial Sequence
  Description of Artificial Sequence: Synthetic oligonucleotide
uggguuuucuugcaccuug

SEQ ID NO: 417 - RNA, 19 nt, Artificial Sequence
  Description of Artificial Sequence: Synthetic oligonucleotide
ggguuuucuugcaccuugg

SEQ ID NO: 418 - RNA, 19 nt, Artificial Sequence
  Description of Artificial Sequence: Synthetic oligonucleotide
gguuuucuugcaccuuggg

SEQ ID NO: 419 - RNA, 19 nt, Artificial Sequence
  Description of Artificial Sequence: Synthetic oligonucleotide
guuuucuugcaccuugggu

SEQ ID NO: 420 - RNA, 19 nt, Artificial Sequence
  Description of Artificial Sequence: Synthetic oligonucleotide
uuuucuugcaccuuggguc

SEQ ID NO: 421 - RNA, 19 nt, Artificial Sequence
  Description of Artificial Sequence: Synthetic oligonucleotide
uuucuugcaccuuggguca

SEQ ID NO: 422 - RNA, 19 nt, Artificial Sequence
  Description of Artificial Sequence: Synthetic oligonucleotide
uucuugcaccuugggucac

SEQ ID NO: 423 - RNA, 19 nt, Artificial Sequence
  Description of Artificial Sequence: Synthetic oligonucleotide
ucuugcaccuugggucacg

SEQ ID NO: 424 - RNA, 19 nt, Artificial Sequence
  Description of Artificial Sequence: Synthetic oligonucleotide
cuugcaccuugggucacgc

SEQ ID NO: 425 - RNA, 19 nt, Artificial Sequence
  Description of Artificial Sequence: Synthetic oligonucleotide
uugcaccuugggucacgcc

SEQ ID NO: 426 - RNA, 19 nt, Artificial Sequence
  Description of Artificial Sequence: Synthetic oligonucleotide
ugcaccuugggucacgccu

SEQ ID NO: 427 - RNA, 19 nt, Artificial Sequence
  Description of Artificial Sequence: Synthetic oligonucleotide
gcaccuugggucacgccuc

SEQ ID NO: 428 - RNA, 19 nt, Artificial Sequence
  Description of Artificial Sequence: Synthetic oligonucleotide
caccuugggucacgccucc

SEQ ID NO: 429 - RNA, 19 nt, Artificial Sequence
  Description of Artificial Sequence: Synthetic oligonucleotide
accuugggucacgccuccu

SEQ ID NO: 430 - RNA, 19 nt, Artificial Sequence
  Description of Artificial Sequence: Synthetic oligonucleotide
ccuugggucacgccuccuu

SEQ ID NO: 431 - RNA, 19 nt, Artificial Sequence
  Description of Artificial Sequence: Synthetic oligonucleotide
cuugggucacgccuccuug

SEQ ID NO: 432 - RNA, 19 nt, Artificial Sequence
  Description of Artificial Sequence: Synthetic oligonucleotide
uugggucacgccuccuugg

SEQ ID NO: 433 - RNA, 19 nt, Artificial Sequence
  Description of Artificial Sequence: Synthetic oligonucleotide
ugggucacgccuccuuggc

SEQ ID NO: 434 - RNA, 19 nt, Artificial Sequence
  Description of Artificial Sequence: Synthetic oligonucleotide
gggucacgccuccuuggcg

SEQ ID NO: 435 - RNA, 19 nt, Artificial Sequence
  Description of Artificial Sequence: Synthetic oligonucleotide
ggucacgccuccuuggcga

SEQ ID NO: 436 - RNA, 19 nt, Artificial Sequence
  Description of Artificial Sequence: Synthetic oligonucleotide
gucacgccuccuuggcgag

SEQ ID NO: 437 - RNA, 19 nt, Artificial Sequence
  Description of Artificial Sequence: Synthetic oligonucleotide
ucacgccuccuuggcgaga

SEQ ID NO: 438 - RNA, 19 nt, Artificial Sequence
  Description of Artificial Sequence: Synthetic oligonucleotide
cacgccuccuuggcgagaa

SEQ ID NO: 439 - RNA, 19 nt, Artificial Sequence
  Description of Artificial Sequence: Synthetic oligonucleotide
acgccuccuuggcgagaaa

SEQ ID NO: 440 - RNA, 19 nt, Artificial Sequence
  Description of Artificial Sequence: Synthetic oligonucleotide
cgccuccuuggcgagaaag

SEQ ID NO: 441 - RNA, 19 nt, Artificial Sequence
  Description of Artificial Sequence: Synthetic oligonucleotide
gccuccuuggcgagaaagc

SEQ ID NO: 442 - RNA, 19 nt, Artificial Sequence
  Description of Artificial Sequence: Synthetic oligonucleotide
ccuccuuggcgagaaagcg

SEQ ID NO: 443 - RNA, 19 nt, Artificial Sequence
  Description of Artificial Sequence: Synthetic oligonucleotide
cuccuuggcgagaaagcgc

SEQ ID NO: 444 - RNA, 19 nt, Artificial Sequence
  Description of Artificial Sequence: Synthetic oligonucleotide
uccuuggcgagaaagcgcc

SEQ ID NO: 445 - RNA, 19 nt, Artificial Sequence
  Description of Artificial Sequence: Synthetic oligonucleotide
ccuuggcgagaaagcgccu

SEQ ID NO: 446 - RNA, 19 nt, Artificial Sequence
  Description of Artificial Sequence: Synthetic oligonucleotide
cuuggcgagaaagcgccuc

SEQ ID NO: 447 - RNA, 19 nt, Artificial Sequence
  Description of Artificial Sequence: Synthetic oligonucleotide
uuggcgagaaagcgccucg

SEQ ID NO: 448 - RNA, 19 nt, Artificial Sequence
  Description of Artificial Sequence: Synthetic oligonucleotide
uggcgagaaagcgccucgc

SEQ ID NO: 449 - RNA, 19 nt, Artificial Sequence
  Description of Artificial Sequence: Synthetic oligonucleotide
ggcgagaaagcgccucgca

SEQ ID NO: 450 - RNA, 19 nt, Artificial Sequence
  Description of Artificial Sequence: Synthetic oligonucleotide
gcgagaaagcgccucgcau

SEQ ID NO: 451 - RNA, 19 nt, Artificial Sequence
  Description of Artificial Sequence: Synthetic oligonucleotide
cgagaaagcgccucgcauu

SEQ ID NO: 452 - RNA, 19 nt, Artificial Sequence
  Description of Artificial Sequence: Synthetic oligonucleotide
gagaaagcgccucgcauuu

SEQ ID NO: 453 - RNA, 19 nt, Artificial Sequence
  Description of Artificial Sequence: Synthetic oligonucleotide
agaaagcgccucgcauuug

SEQ ID NO: 454 - RNA, 19 nt, Artificial Sequence
  Description of Artificial Sequence: Synthetic oligonucleotide
gaaagcgccucgcauuuga

SEQ ID NO: 455 - RNA, 19 nt, Artificial Sequence
  Description of Artificial Sequence: Synthetic oligonucleotide
aaagcgccucgcauuugau

SEQ ID NO: 456 - RNA, 19 nt, Artificial Sequence
  Description of Artificial Sequence: Synthetic oligonucleotide
aagcgccucgcauuugauu

SEQ ID NO: 457 - RNA, 19 nt, Artificial Sequence
  Description of Artificial Sequence: Synthetic oligonucleotide
agcgccucgcauuugauug

SEQ ID NO: 458 - RNA, 19 nt, Artificial Sequence
  Description of Artificial Sequence: Synthetic oligonucleotide
gcgccucgcauuugauugc

SEQ ID NO: 459 - RNA, 19 nt, Artificial Sequence
  Description of Artificial Sequence: Synthetic oligonucleotide
cgccucgcauuugauugcu

SEQ ID NO: 460 - RNA, 19 nt, Artificial Sequence
  Description of Artificial Sequence: Synthetic oligonucleotide
gccucgcauuugauugcuu

SEQ ID NO: 461 - RNA, 19 nt, Artificial Sequence
  Description of Artificial Sequence: Synthetic oligonucleotide
ccucgcauuugauugcuuc

SEQ ID NO: 462 - RNA, 19 nt, Artificial Sequence
  Description of Artificial Sequence: Synthetic oligonucleotide
cucgcauuugauugcuucc

SEQ ID NO: 463 - RNA, 19 nt, Artificial Sequence
  Description of Artificial Sequence: Synthetic oligonucleotide
ucgcauuugauugcuucca

SEQ ID NO: 464 - RNA, 19 nt, Artificial Sequence
  Description of Artificial Sequence: Synthetic oligonucleotide
cgcauuugauugcuuccag

SEQ ID NO: 465 - RNA, 19 nt, Artificial Sequence
  Description of Artificial Sequence: Synthetic oligonucleotide
gcauuugauugcuuccagu

SEQ ID NO: 466 - RNA, 19 nt, Artificial Sequence
  Description of Artificial Sequence: Synthetic oligonucleotide
cauuugauugcuuccaguu

SEQ ID NO: 467 - RNA, 19 nt, Artificial Sequence
  Description of Artificial Sequence: Synthetic oligonucleotide
auuugauugcuuccaguua

SEQ ID NO: 468 - RNA, 19 nt, Artificial Sequence
  Description of Artificial Sequence: Synthetic oligonucleotide
uuugauugcuuccaguuau

SEQ ID NO: 469 - RNA, 19 nt, Artificial Sequence
  Description of Artificial Sequence: Synthetic oligonucleotide
uugauugcuuccaguuauu

SEQ ID NO: 470 - RNA, 19 nt, Artificial Sequence
  Description of Artificial Sequence: Synthetic oligonucleotide
ugauugcuuccaguuauug

SEQ ID NO: 471 - RNA, 19 nt, Artificial Sequence
  Description of Artificial Sequence: Synthetic oligonucleotide
gauugcuuccaguuauugc

SEQ ID NO: 472 - RNA, 19 nt, Artificial Sequence
  Description of Artificial Sequence: Synthetic oligonucleotide
auugcuuccaguuauugca

SEQ ID NO: 473 - RNA, 19 nt, Artificial Sequence
  Description of Artificial Sequence: Synthetic oligonucleotide
uugcuuccaguuauugcag

SEQ ID NO: 474 - RNA, 19 nt, Artificial Sequence
  Description of Artificial Sequence: Synthetic oligonucleotide
ugcuuccaguuauugcaga

SEQ ID NO: 475 - RNA, 19 nt, Artificial Sequence
  Description of Artificial Sequence: Synthetic oligonucleotide
gcuuccaguuauugcagaa

SEQ ID NO: 476 - RNA, 19 nt, Artificial Sequence
  Description of Artificial Sequence: Synthetic oligonucleotide
cuuccaguuauugcagaac

SEQ ID NO: 477 - RNA, 19 nt, Artificial Sequence
  Description of Artificial Sequence: Synthetic oligonucleotide
uuccaguuauugcagaacu

SEQ ID NO: 478 - RNA, 19 nt, Artificial Sequence
  Description of Artificial Sequence: Synthetic oligonucleotide
uccaguuauugcagaacuu

SEQ ID NO: 479 - RNA, 19 nt, Artificial Sequence
  Description of Artificial Sequence: Synthetic oligonucleotide
ccaguuauugcagaacuuc

SEQ ID NO: 480 - RNA, 19 nt, Artificial Sequence
  Description of Artificial Sequence: Synthetic oligonucleotide
caguuauugcagaacuucc

SEQ ID NO: 481 - RNA, 19 nt, Artificial Sequence
  Description of Artificial Sequence: Synthetic oligonucleotide
aguuauugcagaacuuccu

SEQ ID NO: 482 - RNA, 19 nt, Artificial Sequence
  Description of Artificial Sequence: Synthetic oligonucleotide
guuauugcagaacuuccug

SEQ ID NO: 483 - RNA, 19 nt, Artificial Sequence
  Description of Artificial Sequence: Synthetic oligonucleotide
uuauugcagaacuuccugu

SEQ ID NO: 484 - RNA, 19 nt, Artificial Sequence
  Description of Artificial Sequence: Synthetic oligonucleotide
uauugcagaacuuccuguc

SEQ ID NO: 485 - RNA, 19 nt, Artificial Sequence
  Description of Artificial Sequence: Synthetic oligonucleotide
auugcagaacuuccugucc

SEQ ID NO: 486 - RNA, 19 nt, Artificial Sequence
  Description of Artificial Sequence: Synthetic oligonucleotide
uugcagaacuuccuguccu

SEQ ID NO: 487 - RNA, 19 nt, Artificial Sequence
  Description of Artificial Sequence: Synthetic oligonucleotide
ugcagaacuuccuguccug

SEQ ID NO: 488 - RNA, 19 nt, Artificial Sequence
  Description of Artificial Sequence: Synthetic oligonucleotide
gcagaacuuccuguccugg

SEQ ID NO: 489 - RNA, 19 nt, Artificial Sequence
  Description of Artificial Sequence: Synthetic oligonucleotide
cagaacuuccuguccuggu

SEQ ID NO: 490 - RNA, 19 nt, Artificial Sequence
  Description of Artificial Sequence: Synthetic oligonucleotide
agaacuuccuguccuggug

SEQ ID NO: 491 - RNA, 19 nt, Artificial Sequence
  Description of Artificial Sequence: Synthetic oligonucleotide
gaacuuccuguccuggugg

SEQ ID NO: 492 - RNA, 19 nt, Artificial Sequence
  Description of Artificial Sequence: Synthetic oligonucleotide
aacuuccuguccuggugga

SEQ ID NO: 493 - RNA, 19 nt, Artificial Sequence
  Description of Artificial Sequence: Synthetic oligonucleotide
acuuccuguccugguggag

SEQ ID NO: 494 - RNA, 19 nt, Artificial Sequence
  Description of Artificial Sequence: Synthetic oligonucleotide
cuuccuguccugguggaga

SEQ ID NO: 495 - RNA, 19 nt, Artificial Sequence
  Description of Artificial Sequence: Synthetic oligonucleotide
uuccuguccugguggagaa

SEQ ID NO: 496 - RNA, 19 nt, Artificial Sequence
  Description of Artificial Sequence: Synthetic oligonucleotide
uccuguccugguggagaag

SEQ ID NO: 497 - RNA, 19 nt, Artificial Sequence
  Description of Artificial Sequence: Synthetic oligonucleotide
ccuguccugguggagaagc

SEQ ID NO: 498 - RNA, 19 nt, Artificial Sequence
  Description of Artificial Sequence: Synthetic oligonucleotide
cuguccugguggagaagcg

SEQ ID NO: 499 - RNA, 19 nt, Artificial Sequence
  Description of Artificial Sequence: Synthetic oligonucleotide
uguccugguggagaagcgg

SEQ ID NO: 500 - RNA, 19 nt, Artificial Sequence
  Description of Artificial Sequence: Synthetic oligonucleotide
guccugguggagaagcggg

SEQ ID NO: 501 - RNA, 19 nt, Artificial Sequence
  Description of Artificial Sequence: Synthetic oligonucleotide
uccugguggagaagcgggu

SEQ ID NO: 502 - RNA, 19 nt, Artificial Sequence
  Description of Artificial Sequence: Synthetic oligonucleotide
ccugguggagaagcggguc

SEQ ID NO: 503 - RNA, 19 nt, Artificial Sequence
  Description of Artificial Sequence: Synthetic oligonucleotide
cugguggagaagcgggucu

SEQ ID NO: 504 - RNA, 19 nt, Artificial Sequence
  Description of Artificial Sequence: Synthetic oligonucleotide
ugguggagaagcgggucuc

SEQ ID NO: 505 - RNA, 19 nt, Artificial Sequence
  Description of Artificial Sequence: Synthetic oligonucleotide
gguggagaagcgggucucg

SEQ ID NO: 506 - RNA, 19 nt, Artificial Sequence
  Description of Artificial Sequence: Synthetic oligonucleotide
guggagaagcgggucucgc

SEQ ID NO: 507 - RNA, 19 nt, Artificial Sequence
  Description of Artificial Sequence: Synthetic oligonucleotide
uggagaagcgggucucgcu

SEQ ID NO: 508 - RNA, 19 nt, Artificial Sequence
  Description of Artificial Sequence: Synthetic oligonucleotide
ggagaagcgggucucgcuu

SEQ ID NO: 509 - RNA, 19 nt, Artificial Sequence
  Description of Artificial Sequence: Synthetic oligonucleotide
gagaagcgggucucgcuug

SEQ ID NO: 510 - RNA, 19 nt, Artificial Sequence
  Description of Artificial Sequence: Synthetic oligonucleotide
agaagcgggucucgcuugg

SEQ ID NO: 511 - RNA, 19 nt, Artificial Sequence
  Description of Artificial Sequence: Synthetic oligonucleotide
gaagcgggucucgcuuggg

SEQ ID NO: 512 - RNA, 19 nt, Artificial Sequence
  Description of Artificial Sequence: Synthetic oligonucleotide
aagcgggucucgcuugggu

SEQ ID NO: 513 - RNA, 19 nt, Artificial Sequence
  Description of Artificial Sequence: Synthetic oligonucleotide
agcgggucucgcuuggguu

SEQ ID NO: 514 - RNA, 19 nt, Artificial Sequence
  Description of Artificial Sequence: Synthetic oligonucleotide
gcgggucucgcuuggguuc

SEQ ID NO: 515 - RNA, 19 nt, Artificial Sequence
  Description of Artificial Sequence: Synthetic oligonucleotide
cgggucucgcuuggguucc

SEQ ID NO: 516 - RNA, 19 nt, Artificial Sequence
  Description of Artificial Sequence: Synthetic oligonucleotide
gggucucgcuuggguuccg

SEQ ID NO: 517 - RNA, 19 nt, Artificial Sequence
  Description of Artificial Sequence: Synthetic oligonucleotide
ggucucgcuuggguuccgc

SEQ ID NO: 518 - RNA, 19 nt, Artificial Sequence
  Description of Artificial Sequence: Synthetic oligonucleotide
gucucgcuuggguuccgcu

SEQ ID NO: 519 - RNA, 19 nt, Artificial Sequence
  Description of Artificial Sequence: Synthetic oligonucleotide
ucucgcuuggguuccgcua

SEQ ID NO: 520 - RNA, 19 nt, Artificial Sequence
  Description of Artificial Sequence: Synthetic oligonucleotide
cucgcuuggguuccgcuaa

SEQ ID NO: 521 - RNA, 19 nt, Artificial Sequence
  Description of Artificial Sequence: Synthetic oligonucleotide
ucgcuuggguuccgcuaau

SEQ ID NO: 522 - RNA, 19 nt, Artificial Sequence
  Description of Artificial Sequence: Synthetic oligonucleotide
cgcuuggguuccgcuaauu

SEQ ID NO: 523 - RNA, 19 nt, Artificial Sequence
  Description of Artificial Sequence: Synthetic oligonucleotide
gcuuggguuccgcuaauuu

SEQ ID NO: 524 - RNA, 19 nt, Artificial Sequence
  Description of Artificial Sequence: Synthetic oligonucleotide
cuuggguuccgcuaauuuc

SEQ ID NO: 525 - RNA, 19 nt, Artificial Sequence
  Description of Artificial Sequence: Synthetic oligonucleotide
uuggguuccgcuaauuucu

SEQ ID NO: 526 - RNA, 19 nt, Artificial Sequence
  Description of Artificial Sequence: Synthetic oligonucleotide
uggguuccgcuaauuucug

SEQ ID NO: 527 - RNA, 19 nt, Artificial Sequence
  Description of Artificial Sequence: Synthetic oligonucleotide
ggguuccgcuaauuucugu

SEQ ID NO: 528 - RNA, 19 nt, Artificial Sequence
  Description of Artificial Sequence: Synthetic oligonucleotide
gguuccgcuaauuucuguc

SEQ ID NO: 529 - RNA, 19 nt, Artificial Sequence
  Description of Artificial Sequence: Synthetic oligonucleotide
guuccgcuaauuucugucc

SEQ ID NO: 530 - RNA, 19 nt, Artificial Sequence
  Description of Artificial Sequence: Synthetic oligonucleotide
uuccgcuaauuucuguccu

SEQ ID NO: 531 - RNA, 19 nt, Artificial Sequence
  Description of Artificial Sequence: Synthetic oligonucleotide
uccgcuaauuucuguccug

SEQ ID NO: 532 - RNA, 19 nt, Artificial Sequence
  Description of Artificial Sequence: Synthetic oligonucleotide
ccgcuaauuucuguccuga

SEQ ID NO: 533 - RNA, 19 nt, Artificial Sequence
  Description of Artificial Sequence: Synthetic oligonucleotide
cgcuaauuucuguccugag

SEQ ID NO: 534 - RNA, 19 nt, Artificial Sequence
  Description of Artificial Sequence: Synthetic oligonucleotide
gcuaauuucuguccugagg

SEQ ID NO: 535 - RNA, 19 nt, Artificial Sequence
  Description of Artificial Sequence: Synthetic oligonucleotide
cuaauuucuguccugaggc

SEQ ID NO: 536 - RNA, 19 nt, Artificial Sequence
  Description of Artificial Sequence: Synthetic oligonucleotide
uaauuucuguccugaggcg

SEQ ID NO: 537 - RNA, 19 nt, Artificial Sequence
  Description of Artificial Sequence: Synthetic oligonucleotide
aauuucuguccugaggcgu

SEQ ID NO: 538 - RNA, 19 nt, Artificial Sequence
  Description of Artificial Sequence: Synthetic oligonucleotide
auuucuguccugaggcgug

SEQ ID NO: 539 - RNA, 19 nt, Artificial Sequence
  Description of Artificial Sequence: Synthetic oligonucleotide
uuucuguccugaggcguga

SEQ ID NO: 540 - RNA, 19 nt, Artificial Sequence
  Description of Artificial Sequence: Synthetic oligonucleotide
uucuguccugaggcgugag

SEQ ID NO: 541 - RNA, 19 nt, Artificial Sequence
  Description of Artificial Sequence: Synthetic oligonucleotide
ucuguccugaggcgugaga

SEQ ID NO: 542 - RNA, 19 nt, Artificial Sequence
  Description of Artificial Sequence: Synthetic oligonucleotide
cuguccugaggcgugagac

SEQ ID NO: 543 - RNA, 19 nt, Artificial Sequence
  Description of Artificial Sequence: Synthetic oligonucleotide
uguccugaggcgugagacu

SEQ ID NO: 544 - RNA, 19 nt, Artificial Sequence
  Description of Artificial Sequence: Synthetic oligonucleotide
guccugaggcgugagacug

SEQ ID NO: 545 - RNA, 19 nt, Artificial Sequence
  Description of Artificial Sequence: Synthetic oligonucleotide
uccugaggcgugagacuga

SEQ ID NO: 546 - RNA, 19 nt, Artificial Sequence
  Description of Artificial Sequence: Synthetic oligonucleotide
ccugaggcgugagacugag

SEQ ID NO: 547 - RNA, 19 nt, Artificial Sequence
  Description of Artificial Sequence: Synthetic oligonucleotide
cugaggcgugagacugagu

SEQ ID NO: 548 - RNA, 19 nt, Artificial Sequence
  Description of Artificial Sequence: Synthetic oligonucleotide
ugaggcgugagacugaguu

SEQ ID NO: 549 - RNA, 19 nt, Artificial Sequence
  Description of Artificial Sequence: Synthetic oligonucleotide
gaggcgugagacugaguuc

SEQ ID NO: 550 - RNA, 19 nt, Artificial Sequence
  Description of Artificial Sequence: Synthetic oligonucleotide
aggcgugagacugaguuca

SEQ ID NO: 551 - RNA, 19 nt, Artificial Sequence
  Description of Artificial Sequence: Synthetic oligonucleotide
ggcgugagacugaguucau

SEQ ID NO: 552 - RNA, 19 nt, Artificial Sequence
  Description of Artificial Sequence: Synthetic oligonucleotide
gcgugagacugaguucaua

SEQ ID NO: 553 - RNA, 19 nt, Artificial Sequence
  Description of Artificial Sequence: Synthetic oligonucleotide
cgugagacugaguucauag

SEQ ID NO: 554 - RNA, 19 nt, Artificial Sequence
  Description of Artificial Sequence: Synthetic oligonucleotide
gugagacugaguucauagg

SEQ ID NO: 555 - RNA, 19 nt, Artificial Sequence
  Description of Artificial Sequence: Synthetic oligonucleotide
ugagacugaguucauaggg

SEQ ID NO: 556 - RNA, 19 nt, Artificial Sequence
  Description of Artificial Sequence: Synthetic oligonucleotide
gagacugaguucauagggu

SEQ ID NO: 557 - RNA, 19 nt, Artificial Sequence
  Description of Artificial Sequence: Synthetic oligonucleotide
agacugaguucauaggguc

SEQ ID NO: 558 - RNA, 19 nt, Artificial Sequence
  Description of Artificial Sequence: Synthetic oligonucleotide
gacugaguucauagggucc

SEQ ID NO: 559 - RNA, 19 nt, Artificial Sequence
  Description of Artificial Sequence: Synthetic oligonucleotide
acugaguucauaggguccu

SEQ ID NO: 560 - RNA, 19 nt, Artificial Sequence
  Description of Artificial Sequence: Synthetic oligonucleotide
cugaguucauaggguccug

SEQ ID NO: 561 - RNA, 19 nt, Artificial Sequence
  Description of Artificial Sequence: Synthetic oligonucleotide
ugaguucauaggguccugg

SEQ ID NO: 562 - RNA, 19 nt, Artificial Sequence
  Description of Artificial Sequence: Synthetic oligonucleotide
gaguucauaggguccuggg

SEQ ID NO: 563 - RNA, 19 nt, Artificial Sequence
  Description of Artificial Sequence: Synthetic oligonucleotide
aguucauaggguccugggu

SEQ ID NO: 564 - RNA, 19 nt, Artificial Sequence
  Description of Artificial Sequence: Synthetic oligonucleotide
guucauaggguccuggguc

SEQ ID NO: 565 - RNA, 19 nt, Artificial Sequence
  Description of Artificial Sequence: Synthetic oligonucleotide
uucauaggguccugggucc

SEQ ID NO: 566 - RNA, 19 nt, Artificial Sequence
  Description of Artificial Sequence: Synthetic oligonucleotide
ucauaggguccuggguccc

SEQ ID NO: 567 - RNA, 19 nt, Artificial Sequence
  Description of Artificial Sequence: Synthetic oligonucleotide
cauaggguccugggucccc

SEQ ID NO: 568 - RNA, 19 nt, Artificial Sequence
  Description of Artificial Sequence: Synthetic oligonucleotide
auaggguccuggguccccg

SEQ ID NO: 569 - RNA, 19 nt, Artificial Sequence
  Description of Artificial Sequence: Synthetic oligonucleotide
uaggguccuggguccccga

SEQ ID NO: 570 - RNA, 19 nt, Artificial Sequence
  Description of Artificial Sequence: Synthetic oligonucleotide
aggguccuggguccccgaa

SEQ ID NO: 571 - RNA, 19 nt, Artificial Sequence
  Description of Artificial Sequence: Synthetic oligonucleotide
ggguccuggguccccgaac

SEQ ID NO: 572 - RNA, 19 nt, Artificial Sequence
  Description of Artificial Sequence: Synthetic oligonucleotide
gguccuggguccccgaacc

SEQ ID NO: 573 - RNA, 19 nt, Artificial Sequence
  Description of Artificial Sequence: Synthetic oligonucleotide
guccuggguccccgaacca

SEQ ID NO: 574 - RNA, 19 nt, Artificial Sequence
  Description of Artificial Sequence: Synthetic oligonucleotide
uccuggguccccgaaccag

SEQ ID NO: 575 - RNA, 19 nt, Artificial Sequence
  Description of Artificial Sequence: Synthetic oligonucleotide
ccuggguccccgaaccagg

SEQ ID NO: 576 - RNA, 19 nt, Artificial Sequence
  Description of Artificial Sequence: Synthetic oligonucleotide
cuggguccccgaaccagga

SEQ ID NO: 577 - RNA, 19 nt, Artificial Sequence
  Description of Artificial Sequence: Synthetic oligonucleotide
uggguccccgaaccaggaa

SEQ ID NO: 578 - RNA, 19 nt, Artificial Sequence
  Description of Artificial Sequence: Synthetic oligonucleotide
ggguccccgaaccaggaag

SEQ ID NO: 579 - RNA, 19 nt, Artificial Sequence
  Description of Artificial Sequence: Synthetic oligonucleotide
gguccccgaaccaggaagg

SEQ ID NO: 580 - RNA, 19 nt, Artificial Sequence
  Description of Artificial Sequence: Synthetic oligonucleotide
guccccgaaccaggaaggg

SEQ ID NO: 581 - RNA, 19 nt, Artificial Sequence
  Description of Artificial Sequence: Synthetic oligonucleotide
uccccgaaccaggaagggu

SEQ ID NO: 582 - RNA, 19 nt, Artificial Sequence
  Description of Artificial Sequence: Synthetic oligonucleotide
ccccgaaccaggaaggguu

SEQ ID NO: 583 - RNA, 19 nt, Artificial Sequence
  Description of Artificial Sequence: Synthetic oligonucleotide
cccgaaccaggaaggguug

SEQ ID NO: 584 - RNA, 19 nt, Artificial Sequence
  Description of Artificial Sequence: Synthetic oligonucleotide
ccgaaccaggaaggguuga

SEQ ID NO: 585 - RNA, 19 nt, Artificial Sequence
  Description of Artificial Sequence: Synthetic oligonucleotide
cgaaccaggaaggguugag

SEQ ID NO: 586 - RNA, 19 nt, Artificial Sequence
  Description of Artificial Sequence: Synthetic oligonucleotide
gaaccaggaaggguugagg

SEQ ID NO: 587 - RNA, 19 nt, Artificial Sequence
  Description of Artificial Sequence: Synthetic oligonucleotide
aaccaggaaggguugaggg

SEQ ID NO: 588 - RNA, 19 nt, Artificial Sequence
  Description of Artificial Sequence: Synthetic oligonucleotide
accaggaaggguugaggga

SEQ ID NO: 589 - RNA, 19 nt, Artificial Sequence
  Description of Artificial Sequence: Synthetic oligonucleotide
ccaggaaggguugagggaa

SEQ ID NO: 590 - RNA, 19 nt, Artificial Sequence
  Description of Artificial Sequence: Synthetic oligonucleotide
caggaaggguugagggaac

SEQ ID NO: 591 - RNA, 19 nt, Artificial Sequence
  Description of Artificial Sequence: Synthetic oligonucleotide
aggaaggguugagggaaca

SEQ ID NO: 592 - RNA, 19 nt, Artificial Sequence
  Description of Artificial Sequence: Synthetic oligonucleotide
ggaaggguugagggaacac

SEQ ID NO: 593 - RNA, 19 nt, Artificial Sequence
  Description of Artificial Sequence: Synthetic oligonucleotide
gaaggguugagggaacaca

SEQ ID NO: 594 - RNA, 19 nt, Artificial Sequence
  Description of Artificial Sequence: Synthetic oligonucleotide
aaggguugagggaacacaa

SEQ ID NO: 595 - RNA, 19 nt, Artificial Sequence
  Description of Artificial Sequence: Synthetic oligonucleotide
aggguugagggaacacaau

SEQ ID NO: 596 - RNA, 19 nt, Artificial Sequence
  Description of Artificial Sequence: Synthetic oligonucleotide
ggguugagggaacacaauc

SEQ ID NO: 597 - RNA, 19 nt, Artificial Sequence
  Description of Artificial Sequence: Synthetic oligonucleotide
gguugagggaacacaaucu

SEQ ID NO: 598 - RNA, 19 nt, Artificial Sequence
  Description of Artificial Sequence: Synthetic oligonucleotide
guugagggaacacaaucug

SEQ ID NO: 599 - RNA, 19 nt, Artificial Sequence
  Description of Artificial Sequence: Synthetic oligonucleotide
uugagggaacacaaucugc

SEQ ID NO: 600 - RNA, 19 nt, Artificial Sequence
  Description of Artificial Sequence: Synthetic oligonucleotide
ugagggaacacaaucugca

SEQ ID NO: 601 - RNA, 19 nt, Artificial Sequence
  Description of Artificial Sequence: Synthetic oligonucleotide
gagggaacacaaucugcaa

SEQ ID NO: 602 - RNA, 19 nt, Artificial Sequence
  Description of Artificial Sequence: Synthetic oligonucleotide
agggaacacaaucugcaag

SEQ ID NO: 603 - RNA, 19 nt, Artificial Sequence
  Description of Artificial Sequence: Synthetic oligonucleotide
gggaacacaaucugcaagc

SEQ ID NO: 604 - RNA, 19 nt, Artificial Sequence
  Description of Artificial Sequence: Synthetic oligonucleotide
ggaacacaaucugcaagcc

SEQ ID NO: 605 - RNA, 19 nt, Artificial Sequence
  Description of Artificial Sequence: Synthetic oligonucleotide
gaacacaaucugcaagccc

SEQ ID NO: 606 - RNA, 19 nt, Artificial Sequence
  Description of Artificial Sequence: Synthetic oligonucleotide
aacacaaucugcaagcccc

SEQ ID NO: 607 - RNA, 19 nt, Artificial Sequence
  Description of Artificial Sequence: Synthetic oligonucleotide
acacaaucugcaagccccc

SEQ ID NO: 608 - RNA, 19 nt, Artificial Sequence
  Description of Artificial Sequence: Synthetic oligonucleotide
cacaaucugcaagcccccg

SEQ ID NO: 609 - RNA, 19 nt, Artificial Sequence
  Description of Artificial Sequence: Synthetic oligonucleotide
acaaucugcaagcccccgc

SEQ ID NO: 610 - RNA, 19 nt, Artificial Sequence
  Description of Artificial Sequence: Synthetic oligonucleotide
caaucugcaagcccccgcg

SEQ ID NO: 611 - RNA, 19 nt, Artificial Sequence
  Description of Artificial Sequence: Synthetic oligonucleotide
aaucugcaagcccccgcga

SEQ ID NO: 612 - RNA, 19 nt, Artificial Sequence
  Description of Artificial Sequence: Synthetic oligonucleotide
aucugcaagcccccgcgac

SEQ ID NO: 613 - RNA, 19 nt, Artificial Sequence
  Description of Artificial Sequence: Synthetic oligonucleotide
ucugcaagcccccgcgacc

SEQ ID NO: 614 - RNA, 19 nt, Artificial Sequence
  Description of Artificial Sequence: Synthetic oligonucleotide
cugcaagcccccgcgaccc

SEQ ID NO: 615 - RNA, 19 nt, Artificial Sequence
  Description of Artificial Sequence: Synthetic oligonucleotide
ugcaagcccccgcgaccca

SEQ ID NO: 616 - RNA, 19 nt, Artificial Sequence
  Description of Artificial Sequence: Synthetic oligonucleotide
gcaagcccccgcgacccaa

SEQ ID NO: 617 - RNA, 19 nt, Artificial Sequence
  Description of Artificial Sequence: Synthetic oligonucleotide
caagcccccgcgacccaag

SEQ ID NO: 618 - RNA, 19 nt, Artificial Sequence
  Description of Artificial Sequence: Synthetic oligonucleotide
aagcccccgcgacccaagu

SEQ ID NO: 619 - RNA, 19 nt, Artificial Sequence
  Description of Artificial Sequence: Synthetic oligonucleotide
agcccccgcgacccaagug

SEQ ID NO: 620 - RNA, 19 nt, Artificial Sequence
  Description of Artificial Sequence: Synthetic oligonucleotide
gcccccgcgacccaaguga

SEQ ID NO: 621 - RNA, 19 nt, Artificial Sequence
  Description of Artificial Sequence: Synthetic oligonucleotide
cccccgcgacccaagugag

SEQ ID NO: 622 - RNA, 19 nt, Artificial Sequence
  Description of Artificial Sequence: Synthetic oligonucleotide
ccccgcgacccaagugagg

SEQ ID NO: 623 - RNA, 19 nt, Artificial Sequence
  Description of Artificial Sequence: Synthetic oligonucleotide
cccgcgacccaagugaggg

SEQ ID NO: 624 - RNA, 19 nt, Artificial Sequence
  Description of Artificial Sequence: Synthetic oligonucleotide
ccgcgacccaagugagggg

SEQ ID NO: 625 - RNA, 19 nt, Artificial Sequence
  Description of Artificial Sequence: Synthetic oligonucleotide
cgcgacccaagugaggggc

SEQ ID NO: 626 - RNA, 19 nt, Artificial Sequence
  Description of Artificial Sequence: Synthetic oligonucleotide
gcgacccaagugaggggcc

SEQ ID NO: 627 - RNA, 19 nt, Artificial Sequence
  Description of Artificial Sequence: Synthetic oligonucleotide
cgacccaagugaggggccc

SEQ ID NO: 628 - RNA, 19 nt, Artificial Sequence
  Description of Artificial Sequence: Synthetic oligonucleotide
gacccaagugaggggcccc

SEQ ID NO: 629 - RNA, 19 nt, Artificial Sequence
  Description of Artificial Sequence: Synthetic oligonucleotide
acccaagugaggggccccg

SEQ ID NO: 630 - RNA, 19 nt, Artificial Sequence
  Description of Artificial Sequence: Synthetic oligonucleotide
cccaagugaggggccccgu

SEQ ID NO: 631 - RNA, 19 nt, Artificial Sequence
  Description of Artificial Sequence: Synthetic oligonucleotide
ccaagugaggggccccgug

SEQ ID NO: 632 - RNA, 19 nt, Artificial Sequence
  Description of Artificial Sequence: Synthetic oligonucleotide
caagugaggggccccgugu

SEQ ID NO: 633 - RNA, 19 nt, Artificial Sequence
  Description of Artificial Sequence: Synthetic oligonucleotide
aagugaggggccccguguu

SEQ ID NO: 634 - RNA, 19 nt, Artificial Sequence
  Description of Artificial Sequence: Synthetic oligonucleotide
agugaggggccccguguug

SEQ ID NO: 635 - RNA, 19 nt, Artificial Sequence
  Description of Artificial Sequence: Synthetic oligonucleotide
gugaggggccccguguugg

SEQ ID NO: 636 - RNA, 19 nt, Artificial Sequence
  Description of Artificial Sequence: Synthetic oligonucleotide
ugaggggccccguguuggg

SEQ ID NO: 637 - RNA, 19 nt, Artificial Sequence
  Description of Artificial Sequence: Synthetic oligonucleotide
gaggggccccguguugggg

SEQ ID NO: 638 - RNA, 19 nt, Artificial Sequence
  Description of Artificial Sequence: Synthetic oligonucleotide
aggggccccguguuggggu

SEQ ID NO: 639 - RNA, 19 nt, Artificial Sequence
  Description of Artificial Sequence: Synthetic oligonucleotide
ggggccccguguugggguc

SEQ ID NO: 640 - RNA, 19 nt, Artificial Sequence
  Description of Artificial Sequence: Synthetic oligonucleotide
gggccccguguuggggucc

SEQ ID NO: 641 - RNA, 19 nt, Artificial Sequence
  Description of Artificial Sequence: Synthetic oligonucleotide
ggccccguguugggguccu

SEQ ID NO: 642 - RNA, 19 nt, Artificial Sequence
  Description of Artificial Sequence: Synthetic oligonucleotide
gccccguguugggguccuc

SEQ ID NO: 643 - RNA, 19 nt, Artificial Sequence
  Description of Artificial Sequence: Synthetic oligonucleotide
ccccguguugggguccucc

SEQ ID NO: 644 - RNA, 19 nt, Artificial Sequence
  Description of Artificial Sequence: Synthetic oligonucleotide
cccguguugggguccuccc

SEQ ID NO: 645 - RNA, 19 nt, Artificial Sequence
  Description of Artificial Sequence: Synthetic oligonucleotide
ccguguugggguccucccu

SEQ ID NO: 646 - RNA, 19 nt, Artificial Sequence
  Description of Artificial Sequence: Synthetic oligonucleotide
cguguugggguccucccuc

SEQ ID NO: 647 - RNA, 19 nt, Artificial Sequence
  Description of Artificial Sequence: Synthetic oligonucleotide
guguugggguccucccucc

SEQ ID NO: 648 - RNA, 19 nt, Artificial Sequence
  Description of Artificial Sequence: Synthetic oligonucleotide
uguugggguccucccuccc

SEQ ID NO: 649 - RNA, 19 nt, Artificial Sequence
  Description of Artificial Sequence: Synthetic oligonucleotide
guugggguccucccucccu

SEQ ID NO: 650 - RNA, 19 nt, Artificial Sequence
  Description of Artificial Sequence: Synthetic oligonucleotide
uugggguccucccucccuu

SEQ ID NO: 651 - RNA, 19 nt, Artificial Sequence
  Description of Artificial Sequence: Synthetic oligonucleotide
ugggguccucccucccuuu

SEQ ID NO: 652 - RNA, 19 nt, Artificial Sequence
  Description of Artificial Sequence: Synthetic oligonucleotide
gggguccucccucccuuug

SEQ ID NO: 653 - RNA, 19 nt, Artificial Sequence
  Description of Artificial Sequence: Synthetic oligonucleotide
ggguccucccucccuuugc

SEQ ID NO: 654 - RNA, 19 nt, Artificial Sequence
  Description of Artificial Sequence: Synthetic oligonucleotide
gguccucccucccuuugca

SEQ ID NO: 655 - RNA, 19 nt, Artificial Sequence
  Description of Artificial Sequence: Synthetic oligonucleotide
guccucccucccuuugcau

SEQ ID NO: 656 - RNA, 19 nt, Artificial Sequence
  Description of Artificial Sequence: Synthetic oligonucleotide
uccucccucccuuugcauu

SEQ ID NO: 657 - RNA, 19 nt, Artificial Sequence
  Description of Artificial Sequence: Synthetic oligonucleotide
ccucccucccuuugcauuc

SEQ ID NO: 658 - RNA, 19 nt, Artificial Sequence
  Description of Artificial Sequence: Synthetic oligonucleotide
cucccucccuuugcauucc

SEQ ID NO: 659 - RNA, 19 nt, Artificial Sequence
  Description of Artificial Sequence: Synthetic oligonucleotide
ucccucccuuugcauuccc

SEQ ID NO: 660 - RNA, 19 nt, Artificial Sequence
  Description of Artificial Sequence: Synthetic oligonucleotide
cccucccuuugcauuccca

SEQ ID NO: 661 - RNA, 19 nt, Artificial Sequence
  Description of Artificial Sequence: Synthetic oligonucleotide
ccucccuuugcauucccac

SEQ ID NO: 662 - RNA, 19 nt, Artificial Sequence
  Description of Artificial Sequence: Synthetic oligonucleotide
cucccuuugcauucccacc

SEQ ID NO: 663 - RNA, 19 nt, Artificial Sequence
  Description of Artificial Sequence: Synthetic oligonucleotide
ucccuuugcauucccaccc

SEQ ID NO: 664 - RNA, 19 nt, Artificial Sequence
  Description of Artificial Sequence: Synthetic oligonucleotide
cccuuugcauucccacccc

SEQ ID NO: 665 - RNA, 19 nt, Artificial Sequence
  Description of Artificial Sequence: Synthetic oligonucleotide
ccuuugcauucccaccccu

SEQ ID NO: 666 - RNA, 19 nt, Artificial Sequence
  Description of Artificial Sequence: Synthetic oligonucleotide
cuuugcauucccaccccuc

SEQ ID NO: 667 - RNA, 19 nt, Artificial Sequence
  Description of Artificial Sequence: Synthetic oligonucleotide
uuugcauucccaccccucc

SEQ ID NO: 668 - RNA, 19 nt, Artificial Sequence
  Description of Artificial Sequence: Synthetic oligonucleotide
uugcauucccaccccuccg

SEQ ID NO: 669 - RNA, 19 nt, Artificial Sequence
  Description of Artificial Sequence: Synthetic oligonucleotide
ugcauucccaccccuccgg

SEQ ID NO: 670 - RNA, 19 nt, Artificial Sequence
  Description of Artificial Sequence: Synthetic oligonucleotide
gcauucccaccccuccggg

SEQ ID NO: 671 - RNA, 19 nt, Artificial Sequence
  Description of Artificial Sequence: Synthetic oligonucleotide
cauucccaccccuccgggc

SEQ ID NO: 672 - RNA, 19 nt, Artificial Sequence
  Description of Artificial Sequence: Synthetic oligonucleotide
auucccaccccuccgggcu

SEQ ID NO: 673 - RNA, 19 nt, Artificial Sequence
  Description of Artificial Sequence: Synthetic oligonucleotide
uucccaccccuccgggcuu

SEQ ID NO: 674 - RNA, 19 nt, Artificial Sequence
  Description of Artificial Sequence: Synthetic oligonucleotide
ucccaccccuccgggcuuu

SEQ ID NO: 675 - RNA, 19 nt, Artificial Sequence
  Description of Artificial Sequence: Synthetic oligonucleotide
cccaccccuccgggcuuug

SEQ ID NO: 676 - RNA, 19 nt, Artificial Sequence
  Description of Artificial Sequence: Synthetic oligonucleotide
ccaccccuccgggcuuugc

SEQ ID NO: 677 - RNA, 19 nt, Artificial Sequence
  Description of Artificial Sequence: Synthetic oligonucleotide
caccccuccgggcuuugcg

SEQ ID NO: 678 - RNA, 19 nt, Artificial Sequence
  Description of Artificial Sequence: Synthetic oligonucleotide
accccuccgggcuuugcgu

SEQ ID NO: 679 - RNA, 19 nt, Artificial Sequence
  Description of Artificial Sequence: Synthetic oligonucleotide
ccccuccgggcuuugcguc

SEQ ID NO: 680 - RNA, 19 nt, Artificial Sequence
  Description of Artificial Sequence: Synthetic oligonucleotide
cccuccgggcuuugcgucu

SEQ ID NO: 681 - RNA, 19 nt, Artificial Sequence
  Description of Artificial Sequence: Synthetic oligonucleotide
ccuccgggcuuugcgucuu

SEQ ID NO: 682 - RNA, 19 nt, Artificial Sequence
  Description of Artificial Sequence: Synthetic oligonucleotide
cuccgggcuuugcgucuuc

SEQ ID NO: 683 - RNA, 19 nt, Artificial Sequence
  Description of Artificial Sequence: Synthetic oligonucleotide
uccgggcuuugcgucuucc

SEQ ID NO: 684 - RNA, 19 nt, Artificial Sequence
  Description of Artificial Sequence: Synthetic oligonucleotide
ccgggcuuugcgucuuccu

SEQ ID NO: 685 - RNA, 19 nt, Artificial Sequence
  Description of Artificial Sequence: Synthetic oligonucleotide
cgggcuuugcgucuuccug

SEQ ID NO: 686 - RNA, 19 nt, Artificial Sequence
  Description of Artificial Sequence: Synthetic oligonucleotide
gggcuuugcgucuuccugg

SEQ ID NO: 687 - RNA, 19 nt, Artificial Sequence
  Description of Artificial Sequence: Synthetic oligonucleotide
ggcuuugcgucuuccuggg

SEQ ID NO: 688 - RNA, 19 nt, Artificial Sequence
  Description of Artificial Sequence: Synthetic oligonucleotide
gcuuugcgucuuccugggg

SEQ ID NO: 689 - RNA, 19 nt, Artificial Sequence
  Description of Artificial Sequence: Synthetic oligonucleotide
cuuugcgucuuccugggga

SEQ ID NO: 690 - RNA, 19 nt, Artificial Sequence
  Description of Artificial Sequence: Synthetic oligonucleotide
uuugcgucuuccuggggac

SEQ ID NO: 691 - RNA, 19 nt, Artificial Sequence
  Description of Artificial Sequence: Synthetic oligonucleotide
uugcgucuuccuggggacc

SEQ ID NO: 692 - RNA, 19 nt, Artificial Sequence
  Description of Artificial Sequence: Synthetic oligonucleotide
ugcgucuuccuggggaccc

SEQ ID NO: 693 - RNA, 19 nt, Artificial Sequence
  Description of Artificial Sequence: Synthetic oligonucleotide
gcgucuuccuggggacccc

SEQ ID NO: 694 - RNA, 19 nt, Artificial Sequence
  Description of Artificial Sequence: Synthetic oligonucleotide
cgucuuccuggggaccccc

SEQ ID NO: 695 - RNA, 19 nt, Artificial Sequence
  Description of Artificial Sequence: Synthetic oligonucleotide
gucuuccuggggacccccu

SEQ ID NO: 696 - RNA, 19 nt, Artificial Sequence
  Description of Artificial Sequence: Synthetic oligonucleotide
ucuuccuggggacccccuc

SEQ ID NO: 697 - RNA, 19 nt, Artificial Sequence
  Description of Artificial Sequence: Synthetic oligonucleotide
cuuccuggggacccccucg

SEQ ID NO: 698 - RNA, 19 nt, Artificial Sequence
  Description of Artificial Sequence: Synthetic oligonucleotide
uuccuggggacccccucgc

SEQ ID NO: 699 - RNA, 19 nt, Artificial Sequence
  Description of Artificial Sequence: Synthetic oligonucleotide
uccuggggacccccucgcc

SEQ ID NO: 700 - RNA, 19 nt, Artificial Sequence
  Description of Artificial Sequence: Synthetic oligonucleotide
ccuggggacccccucgccg

SEQ ID NO: 701 - RNA, 19 nt, Artificial Sequence
  Description of Artificial Sequence: Synthetic oligonucleotide
cuggggacccccucgccgg

SEQ ID NO: 702 - RNA, 19 nt, Artificial Sequence
  Description of Artificial Sequence: Synthetic oligonucleotide
uggggacccccucgccggg

SEQ ID NO: 703 - RNA, 19 nt, Artificial Sequence
  Description of Artificial Sequence: Synthetic oligonucleotide
ggggacccccucgccggga

SEQ ID NO: 704 - RNA, 19 nt, Artificial Sequence
  Description of Artificial Sequence: Synthetic oligonucleotide
gggacccccucgccgggag

SEQ ID NO: 705 - RNA, 19 nt, Artificial Sequence
  Description of Artificial Sequence: Synthetic oligonucleotide
ggacccccucgccgggaga

SEQ ID NO: 706 - RNA, 19 nt, Artificial Sequence
  Description of Artificial Sequence: Synthetic oligonucleotide
gacccccucgccgggagau

SEQ ID NO: 707 - RNA, 19 nt, Artificial Sequence
  Description of Artificial Sequence: Synthetic oligonucleotide
acccccucgccgggagaug

SEQ ID NO: 708 - RNA, 19 nt, Artificial Sequence
  Description of Artificial Sequence: Synthetic oligonucleotide
cccccucgccgggagaugg

SEQ ID NO: 709 - RNA, 19 nt, Artificial Sequence
  Description of Artificial Sequence: Synthetic oligonucleotide
ccccucgccgggagauggc

SEQ ID NO: 710 - RNA, 19 nt, Artificial Sequence
  Description of Artificial Sequence: Synthetic oligonucleotide
cccucgccgggagauggcc

SEQ ID NO: 711 - RNA, 19 nt, Artificial Sequence
  Description of Artificial Sequence: Synthetic oligonucleotide
ccucgccgggagauggccg

SEQ ID NO: 712 - RNA, 19 nt, Artificial Sequence
  Description of Artificial Sequence: Synthetic oligonucleotide
cucgccgggagauggccgc

SEQ ID NO: 713 - RNA, 19 nt, Artificial Sequence
  Description of Artificial Sequence: Synthetic oligonucleotide
ucgccgggagauggccgcg

SEQ ID NO: 714 - RNA, 19 nt, Artificial Sequence
  Description of Artificial Sequence: Synthetic oligonucleotide
cgccgggagauggccgcgu

SEQ ID NO: 715 - RNA, 19 nt, Artificial Sequence
  Description of Artificial Sequence: Synthetic oligonucleotide
gccgggagauggccgcguu

SEQ ID NO: 716 - RNA, 19 nt, Artificial Sequence
  Description of Artificial Sequence: Synthetic oligonucleotide
ccgggagauggccgcguug

SEQ ID NO: 717 - RNA, 19 nt, Artificial Sequence
  Description of Artificial Sequence: Synthetic oligonucleotide
cgggagauggccgcguuga

SEQ ID NO: 718 - RNA, 19 nt, Artificial Sequence
  Description of Artificial Sequence: Synthetic oligonucleotide
gggagauggccgcguugau

SEQ ID NO: 719 - RNA, 19 nt, Artificial Sequence
  Description of Artificial Sequence: Synthetic oligonucleotide
ggagauggccgcguugaug

SEQ ID NO: 720 - RNA, 19 nt, Artificial Sequence
  Description of Artificial Sequence: Synthetic oligonucleotide
gagauggccgcguugaugc

SEQ ID NO: 721 - RNA, 19 nt, Artificial Sequence
  Description of Artificial Sequence: Synthetic oligonucleotide
agauggccgcguugaugcg

SEQ ID NO: 722 - RNA, 19 nt, Artificial Sequence
  Description of Artificial Sequence: Synthetic oligonucleotide
gauggccgcguugaugcgg

SEQ ID NO: 723 - RNA, 19 nt, Artificial Sequence
  Description of Artificial Sequence: Synthetic oligonucleotide
auggccgcguugaugcgga

SEQ ID NO: 724 - RNA, 19 nt, Artificial Sequence
  Description of Artificial Sequence: Synthetic oligonucleotide
uggccgcguugaugcggag

SEQ ID NO: 725 - RNA, 19 nt, Artificial Sequence
  Description of Artificial Sequence: Synthetic oligonucleotide
ggccgcguugaugcggagc

SEQ ID NO: 726 - RNA, 19 nt, Artificial Sequence
  Description of Artificial Sequence: Synthetic oligonucleotide
gccgcguugaugcggagca

SEQ ID NO: 727 - RNA, 19 nt, Artificial Sequence
  Description of Artificial Sequence: Synthetic oligonucleotide
ccgcguugaugcggagcaa

SEQ ID NO: 728 - RNA, 19 nt, Artificial Sequence
  Description of Artificial Sequence: Synthetic oligonucleotide
cgcguugaugcggagcaag

SEQ ID NO: 729 - RNA, 19 nt, Artificial Sequence
  Description of Artificial Sequence: Synthetic oligonucleotide
gcguugaugcggagcaagg

SEQ ID NO: 730 - RNA, 19 nt, Artificial Sequence
  Description of Artificial Sequence: Synthetic oligonucleotide
cguugaugcggagcaagga

SEQ ID NO: 731 - RNA, 19 nt, Artificial Sequence
  Description of Artificial Sequence: Synthetic oligonucleotide
guugaugcggagcaaggau

SEQ ID NO: 732 - RNA, 19 nt, Artificial Sequence
  Description of Artificial Sequence: Synthetic oligonucleotide
uugaugcggagcaaggauu

SEQ ID NO: 733 - RNA, 19 nt, Artificial Sequence
  Description of Artificial Sequence: Synthetic oligonucleotide
ugaugcggagcaaggauuc

SEQ ID NO: 734 - RNA, 19 nt, Artificial Sequence
  Description of Artificial Sequence: Synthetic oligonucleotide
gaugcggagcaaggauucg

SEQ ID NO: 735 - RNA, 19 nt, Artificial Sequence
  Description of Artificial Sequence: Synthetic oligonucleotide
augcggagcaaggauucgu

SEQ ID NO: 736 - RNA, 19 nt, Artificial Sequence
  Description of Artificial Sequence: Synthetic oligonucleotide
ugcggagcaaggauucguc

SEQ ID NO: 737 - RNA, 19 nt, Artificial Sequence
  Description of Artificial Sequence: Synthetic oligonucleotide
gcggagcaaggauucgucc

SEQ ID NO: 738 - RNA, 19 nt, Artificial Sequence
  Description of Artificial Sequence: Synthetic oligonucleotide
cggagcaaggauucguccu

SEQ ID NO: 739 - RNA, 19 nt, Artificial Sequence
  Description of Artificial Sequence: Synthetic oligonucleotide
ggagcaaggauucguccug

SEQ ID NO: 740 - RNA, 19 nt, Artificial Sequence
  Description of Artificial Sequence: Synthetic oligonucleotide
gagcaaggauucguccugc

SEQ ID NO: 741 - RNA, 19 nt, Artificial Sequence
  Description of Artificial Sequence: Synthetic oligonucleotide
agcaaggauucguccugcu

SEQ ID NO: 742 - RNA, 19 nt, Artificial Sequence
  Description of Artificial Sequence: Synthetic oligonucleotide
gcaaggauucguccugcug

SEQ ID NO: 743 - RNA, 19 nt, Artificial Sequence
  Description of Artificial Sequence: Synthetic oligonucleotide
caaggauucguccugcugc

SEQ ID NO: 744 - RNA, 19 nt, Artificial Sequence
  Description of Artificial Sequence: Synthetic oligonucleotide
aaggauucguccugcugcc

SEQ ID NO: 745 - RNA, 19 nt, Artificial Sequence
  Description of Artificial Sequence: Synthetic oligonucleotide
aggauucguccugcugccu

SEQ ID NO: 746 - RNA, 19 nt, Artificial Sequence
  Description of Artificial Sequence: Synthetic oligonucleotide
ggauucguccugcugccug

SEQ ID NO: 747 - RNA, 19 nt, Artificial Sequence
  Description of Artificial Sequence: Synthetic oligonucleotide
gauucguccugcugccugc

SEQ ID NO: 748 - RNA, 19 nt, Artificial Sequence
  Description of Artificial Sequence: Synthetic oligonucleotide
auucguccugcugccugcu

SEQ ID NO: 749 - RNA, 19 nt, Artificial Sequence
  Description of Artificial Sequence: Synthetic oligonucleotide
uucguccugcugccugcuc

SEQ ID NO: 750 - RNA, 19 nt, Artificial Sequence
  Description of Artificial Sequence: Synthetic oligonucleotide
ucguccugcugccugcucc

SEQ ID NO: 751 - RNA, 19 nt, Artificial Sequence
  Description of Artificial Sequence: Synthetic oligonucleotide
cguccugcugccugcuccu

SEQ ID NO: 752 - RNA, 19 nt, Artificial Sequence
  Description of Artificial Sequence: Synthetic oligonucleotide
guccugcugccugcuccua

SEQ ID NO: 753 - RNA, 19 nt, Artificial Sequence
  Description of Artificial Sequence: Synthetic oligonucleotide
uccugcugccugcuccuac

SEQ ID NO: 754 - RNA, 19 nt, Artificial Sequence
  Description of Artificial Sequence: Synthetic oligonucleotide
ccugcugccugcuccuacu

SEQ ID NO: 755 - RNA, 19 nt, Artificial Sequence
  Description of Artificial Sequence: Synthetic oligonucleotide
cugcugccugcuccuacug

SEQ ID NO: 756 - RNA, 19 nt, Artificial Sequence
  Description of Artificial Sequence: Synthetic oligonucleotide
ugcugccugcuccuacugg

SEQ ID NO: 757 - RNA, 19 nt, Artificial Sequence
  Description of Artificial Sequence: Synthetic oligonucleotide
gcugccugcuccuacuggc

SEQ ID NO: 758 - RNA, 19 nt, Artificial Sequence
  Description of Artificial Sequence: Synthetic oligonucleotide
cugccugcuccuacuggcc

SEQ ID NO: 759 - RNA, 19 nt, Artificial Sequence
  Description of Artificial Sequence: Synthetic oligonucleotide
ugccugcuccuacuggccg

SEQ ID NO: 760 - RNA, 19 nt, Artificial Sequence
  Description of Artificial Sequence: Synthetic oligonucleotide
gccugcuccuacuggccgc

SEQ ID NO: 761 - RNA, 19 nt, Artificial Sequence
  Description of Artificial Sequence: Synthetic oligonucleotide
ccugcuccuacuggccgcg

SEQ ID NO: 762 - RNA, 19 nt, Artificial Sequence
  Description of Artificial Sequence: Synthetic oligonucleotide
cugcuccuacuggccgcgg

SEQ ID NO: 763 - RNA, 19 nt, Artificial Sequence
  Description of Artificial Sequence: Synthetic oligonucleotide
ugcuccuacuggccgcggu

SEQ ID NO: 764 - RNA, 19 nt, Artificial Sequence
  Description of Artificial Sequence: Synthetic oligonucleotide
gcuccuacuggccgcggug

SEQ ID NO: 765 - RNA, 19 nt, Artificial Sequence
  Description of Artificial Sequence: Synthetic oligonucleotide
cuccuacuggccgcggugc

SEQ ID NO: 766 - RNA, 19 nt, Artificial Sequence
  Description of Artificial Sequence: Synthetic oligonucleotide
uccuacuggccgcggugcu

SEQ ID NO: 767 - RNA, 19 nt, Artificial Sequence
  Description of Artificial Sequence: Synthetic oligonucleotide
ccuacuggccgcggugcug

SEQ ID NO: 768 - RNA, 19 nt, Artificial Sequence
  Description of Artificial Sequence: Synthetic oligonucleotide
cuacuggccgcggugcuga

SEQ ID NO: 769 - RNA, 19 nt, Artificial Sequence
  Description of Artificial Sequence: Synthetic oligonucleotide
uacuggccgcggugcugau

SEQ ID NO: 770 - RNA, 19 nt, Artificial Sequence
  Description of Artificial Sequence: Synthetic oligonucleotide
acuggccgcggugcugaug

SEQ ID NO: 771 - RNA, 19 nt, Artificial Sequence
  Description of Artificial Sequence: Synthetic oligonucleotide
cuggccgcggugcugaugg

SEQ ID NO: 772 - RNA, 19 nt, Artificial Sequence
  Description of Artificial Sequence: Synthetic oligonucleotide
uggccgcggugcugauggu

SEQ ID NO: 773 - RNA, 19 nt, Artificial Sequence
  Description of Artificial Sequence: Synthetic oligonucleotide
ggccgcggugcugauggug

SEQ ID NO: 774 - RNA, 19 nt, Artificial Sequence
  Description of Artificial Sequence: Synthetic oligonucleotide
gccgcggugcugauggugg

SEQ ID NO: 775 - RNA, 19 nt, Artificial Sequence
  Description of Artificial Sequence: Synthetic oligonucleotide
ccgcggugcugauggugga

SEQ ID NO: 776 - RNA, 19 nt, Artificial Sequence
  Description of Artificial Sequence: Synthetic oligonucleotide
cgcggugcugaugguggag

SEQ ID NO: 777 - RNA, 19 nt, Artificial Sequence
  Description of Artificial Sequence: Synthetic oligonucleotide
gcggugcugaugguggaga

SEQ ID NO: 778 - RNA, 19 nt, Artificial Sequence
  Description of Artificial Sequence: Synthetic oligonucleotide
cggugcugaugguggagag

SEQ ID NO: 779 - RNA, 19 nt, Artificial Sequence
  Description of Artificial Sequence: Synthetic oligonucleotide
ggugcugaugguggagagc

SEQ ID NO: 780 - RNA, 19 nt, Artificial Sequence
  Description of Artificial Sequence: Synthetic oligonucleotide
gugcugaugguggagagcu

SEQ ID NO: 781 - RNA, 19 nt, Artificial Sequence
  Description of Artificial Sequence: Synthetic oligonucleotide
ugcugaugguggagagcuc

SEQ ID NO: 782 - RNA, 19 nt, Artificial Sequence
  Description of Artificial Sequence: Synthetic oligonucleotide
gcugaugguggagagcuca

SEQ ID NO: 783 - RNA, 19 nt, Artificial Sequence
  Description of Artificial Sequence: Synthetic oligonucleotide
cugaugguggagagcucac

SEQ ID NO: 784 - RNA, 19 nt, Artificial Sequence
  Description of Artificial Sequence: Synthetic oligonucleotide
ugaugguggagagcucaca

SEQ ID NO: 785 - RNA, 19 nt, Artificial Sequence
  Description of Artificial Sequence: Synthetic oligonucleotide
gaugguggagagcucacag

SEQ ID NO: 786 - RNA, 19 nt, Artificial Sequence
  Description of Artificial Sequence: Synthetic oligonucleotide
augguggagagcucacaga

SEQ ID NO: 787 - RNA, 19 nt, Artificial Sequence
  Description of Artificial Sequence: Synthetic oligonucleotide
ugguggagagcucacagau

SEQ ID NO: 788 - RNA, 19 nt, Artificial Sequence
  Description of Artificial Sequence: Synthetic oligonucleotide
gguggagagcucacagauc

SEQ ID NO: 789 - RNA, 19 nt, Artificial Sequence
  Description of Artificial Sequence: Synthetic oligonucleotide
guggagagcucacagaucg

SEQ ID NO: 790 - RNA, 19 nt, Artificial Sequence
  Description of Artificial Sequence: Synthetic oligonucleotide
uggagagcucacagaucgg

SEQ ID NO: 791 - RNA, 19 nt, Artificial Sequence
  Description of Artificial Sequence: Synthetic oligonucleotide
ggagagcucacagaucggc

SEQ ID NO: 792 - RNA, 19 nt, Artificial Sequence
  Description of Artificial Sequence: Synthetic oligonucleotide
gagagcucacagaucggca

SEQ ID NO: 793 - RNA, 19 nt, Artificial Sequence
  Description of Artificial Sequence: Synthetic oligonucleotide
agagcucacagaucggcag

SEQ ID NO: 794 - RNA, 19 nt, Artificial Sequence
  Description of Artificial Sequence: Synthetic oligonucleotide
gagcucacagaucggcagu

SEQ ID NO: 795 - RNA, 19 nt, Artificial Sequence
  Description of Artificial Sequence: Synthetic oligonucleotide
agcucacagaucggcaguu

SEQ ID NO: 796 - RNA, 19 nt, Artificial Sequence
  Description of Artificial Sequence: Synthetic oligonucleotide
gcucacagaucggcaguuc

SEQ ID NO: 797 - RNA, 19 nt, Artificial Sequence
  Description of Artificial Sequence: Synthetic oligonucleotide
cucacagaucggcaguucg

SEQ ID NO: 798 - RNA, 19 nt, Artificial Sequence
  Description of Artificial Sequence: Synthetic oligonucleotide
ucacagaucggcaguucgc

SEQ ID NO: 799 - RNA, 19 nt, Artificial Sequence
  Description of Artificial Sequence: Synthetic oligonucleotide
cacagaucggcaguucgcg

SEQ ID NO: 800 - RNA, 19 nt, Artificial Sequence
  Description of Artificial Sequence: Synthetic oligonucleotide
acagaucggcaguucgcgg

SEQ ID NO: 801 - RNA, 19 nt, Artificial Sequence
  Description of Artificial Sequence: Synthetic oligonucleotide
cagaucggcaguucgcggg

SEQ ID NO: 802 - RNA, 19 nt, Artificial Sequence
  Description of Artificial Sequence: Synthetic oligonucleotide
agaucggcaguucgcgggc

SEQ ID NO: 803 - RNA, 19 nt, Artificial Sequence
  Description of Artificial Sequence: Synthetic oligonucleotide
gaucggcaguucgcgggcc

SEQ ID NO: 804 - RNA, 19 nt, Artificial Sequence
  Description of Artificial Sequence: Synthetic oligonucleotide
aucggcaguucgcgggcca

SEQ ID NO: 805 - RNA, 19 nt, Artificial Sequence
  Description of Artificial Sequence: Synthetic oligonucleotide
ucggcaguucgcgggccaa

SEQ ID NO: 806 - RNA, 19 nt, Artificial Sequence
  Description of Artificial Sequence: Synthetic oligonucleotide
cggcaguucgcgggccaaa

SEQ ID NO: 807 - RNA, 19 nt, Artificial Sequence
  Description of Artificial Sequence: Synthetic oligonucleotide
ggcaguucgcgggccaaac

SEQ ID NO: 808 - RNA, 19 nt, Artificial Sequence
  Description of Artificial Sequence: Synthetic oligonucleotide
gcaguucgcgggccaaacu

SEQ ID NO: 809 - RNA, 19 nt, Artificial Sequence
  Description of Artificial Sequence: Synthetic oligonucleotide
caguucgcgggccaaacuc

SEQ ID NO: 810 - RNA, 19 nt, Artificial Sequence
  Description of Artificial Sequence: Synthetic oligonucleotide
aguucgcgggccaaacuca

SEQ ID NO: 811 - RNA, 19 nt, Artificial Sequence
  Description of Artificial Sequence: Synthetic oligonucleotide
guucgcgggccaaacucaa

SEQ ID NO: 812 - RNA, 19 nt, Artificial Sequence
  Description of Artificial Sequence: Synthetic oligonucleotide
uucgcgggccaaacucaac

SEQ ID NO: 813 - RNA, 19 nt, Artificial Sequence
  Description of Artificial Sequence: Synthetic oligonucleotide
ucgcgggccaaacucaacu

SEQ ID NO: 814 - RNA, 19 nt, Artificial Sequence
  Description of Artificial Sequence: Synthetic oligonucleotide
cgcgggccaaacucaacuc

SEQ ID NO: 815 - RNA, 19 nt, Artificial Sequence
  Description of Artificial Sequence: Synthetic oligonucleotide
gcgggccaaacucaacucc

SEQ ID NO: 816 - RNA, 19 nt, Artificial Sequence
  Description of Artificial Sequence: Synthetic oligonucleotide
cgggccaaacucaacucca

SEQ ID NO: 817 - RNA, 19 nt, Artificial Sequence
  Description of Artificial Sequence: Synthetic oligonucleotide
gggccaaacucaacuccau

SEQ ID NO: 818 - RNA, 19 nt, Artificial Sequence
  Description of Artificial Sequence: Synthetic oligonucleotide
ggccaaacucaacuccauc

SEQ ID NO: 819 - RNA, 19 nt, Artificial Sequence
  Description of Artificial Sequence: Synthetic oligonucleotide
gccaaacucaacuccauca

SEQ ID NO: 820 - RNA, 19 nt, Artificial Sequence
  Description of Artificial Sequence: Synthetic oligonucleotide
ccaaacucaacuccaucaa

SEQ ID NO: 821 - RNA, 19 nt, Artificial Sequence
  Description of Artificial Sequence: Synthetic oligonucleotide
caaacucaacuccaucaag

SEQ ID NO: 822 - RNA, 19 nt, Artificial Sequence
  Description of Artificial Sequence: Synthetic oligonucleotide
aaacucaacuccaucaagu

SEQ ID NO: 823 - RNA, 19 nt, Artificial Sequence
  Description of Artificial Sequence: Synthetic oligonucleotide
aacucaacuccaucaaguc

SEQ ID NO: 824 - RNA, 19 nt, Artificial Sequence
  Description of Artificial Sequence: Synthetic oligonucleotide
acucaacuccaucaagucc

SEQ ID NO: 825 - RNA, 19 nt, Artificial Sequence
  Description of Artificial Sequence: Synthetic oligonucleotide
cucaacuccaucaaguccu

SEQ ID NO: 826 - RNA, 19 nt, Artificial Sequence
  Description of Artificial Sequence: Synthetic oligonucleotide
ucaacuccaucaaguccuc

SEQ ID NO: 827 - RNA, 19 nt, Artificial Sequence
  Description of Artificial Sequence: Synthetic oligonucleotide
caacuccaucaaguccucu

SEQ ID NO: 828 - RNA, 19 nt, Artificial Sequence
  Description of Artificial Sequence: Synthetic oligonucleotide
aacuccaucaaguccucuc

SEQ ID NO: 829 - RNA, 19 nt, Artificial Sequence
  Description of Artificial Sequence: Synthetic oligonucleotide
acuccaucaaguccucucu

SEQ ID NO: 830 - RNA, 19 nt, Artificial Sequence
  Description of Artificial Sequence: Synthetic oligonucleotide
cuccaucaaguccucucug

SEQ ID NO: 831 - RNA, 19 nt, Artificial Sequence
  Description of Artificial Sequence: Synthetic oligonucleotide
uccaucaaguccucucugg

SEQ ID NO: 832 - RNA, 19 nt, Artificial Sequence
  Description of Artificial Sequence: Synthetic oligonucleotide
ccaucaaguccucucuggg

SEQ ID NO: 833 - RNA, 19 nt, Artificial Sequence
  Description of Artificial Sequence: Synthetic oligonucleotide
caucaaguccucucugggc

SEQ ID NO: 834 - RNA, 19 nt, Artificial Sequence
  Description of Artificial Sequence: Synthetic oligonucleotide
aucaaguccucucugggcg

SEQ ID NO: 835 - RNA, 19 nt, Artificial Sequence
  Description of Artificial Sequence: Synthetic oligonucleotide
ucaaguccucucugggcgg

SEQ ID NO: 836 - RNA, 19 nt, Artificial Sequence
  Description of Artificial Sequence: Synthetic oligonucleotide
caaguccucucugggcggg

SEQ ID NO: 837 - RNA, 19 nt, Artificial Sequence
  Description of Artificial Sequence: Synthetic oligonucleotide
aaguccucucugggcgggg

SEQ ID NO: 838 - RNA, 19 nt, Artificial Sequence
  Description of Artificial Sequence: Synthetic oligonucleotide
aguccucucugggcgggga

SEQ ID NO: 839 - RNA, 19 nt, Artificial Sequence
  Description of Artificial Sequence: Synthetic oligonucleotide
guccucucugggcggggag

SEQ ID NO: 840 - RNA, 19 nt, Artificial Sequence
  Description of Artificial Sequence: Synthetic oligonucleotide
uccucucugggcggggaga

SEQ ID NO: 841 - RNA, 19 nt, Artificial Sequence
  Description of Artificial Sequence: Synthetic oligonucleotide
ccucucugggcggggagac

SEQ ID NO: 842 - RNA, 19 nt, Artificial Sequence
  Description of Artificial Sequence: Synthetic oligonucleotide
cucucugggcggggagacg

SEQ ID NO: 843 - RNA, 19 nt, Artificial Sequence
  Description of Artificial Sequence: Synthetic oligonucleotide
ucucugggcggggagacgc

SEQ ID NO: 844 - RNA, 19 nt, Artificial Sequence
  Description of Artificial Sequence: Synthetic oligonucleotide
cucugggcggggagacgcc

SEQ ID NO: 845 - RNA, 19 nt, Artificial Sequence
  Description of Artificial Sequence: Synthetic oligonucleotide
ucugggcggggagacgccu

SEQ ID NO: 846 - RNA, 19 nt, Artificial Sequence
  Description of Artificial Sequence: Synthetic oligonucleotide
cugggcggggagacgccug

SEQ ID NO: 847 - RNA, 19 nt, Artificial Sequence
  Description of Artificial Sequence: Synthetic oligonucleotide
ugggcggggagacgccugg

SEQ ID NO: 848 - RNA, 19 nt, Artificial Sequence
  Description of Artificial Sequence: Synthetic oligonucleotide
gggcggggagacgccuggu

SEQ ID NO: 849 - RNA, 19 nt, Artificial Sequence
  Description of Artificial Sequence: Synthetic oligonucleotide
ggcggggagacgccugguc

SEQ ID NO: 850 - RNA, 19 nt, Artificial Sequence
  Description of Artificial Sequence: Synthetic oligonucleotide
gcggggagacgccugguca

SEQ ID NO: 851 - RNA, 19 nt, Artificial Sequence
  Description of Artificial Sequence: Synthetic oligonucleotide
cggggagacgccuggucag

SEQ ID NO: 852 - RNA, 19 nt, Artificial Sequence
  Description of Artificial Sequence: Synthetic oligonucleotide
ggggagacgccuggucagg

SEQ ID NO: 853 - RNA, 19 nt, Artificial Sequence
  Description of Artificial Sequence: Synthetic oligonucleotide
gggagacgccuggucaggc

SEQ ID NO: 854 - RNA, 19 nt, Artificial Sequence
  Description of Artificial Sequence: Synthetic oligonucleotide
ggagacgccuggucaggcc

SEQ ID NO: 855 - RNA, 19 nt, Artificial Sequence
  Description of Artificial Sequence: Synthetic oligonucleotide
gagacgccuggucaggccg

SEQ ID NO: 856 - RNA, 19 nt, Artificial Sequence
  Description of Artificial Sequence: Synthetic oligonucleotide
agacgccuggucaggccgc

SEQ ID NO: 857 - RNA, 19 nt, Artificial Sequence
  Description of Artificial Sequence: Synthetic oligonucleotide
gacgccuggucaggccgcc

SEQ ID NO: 858 - RNA, 19 nt, Artificial Sequence
  Description of Artificial Sequence: Synthetic oligonucleotide
acgccuggucaggccgcca

SEQ ID NO: 859 - RNA, 19 nt, Artificial Sequence
  Description of Artificial Sequence: Synthetic oligonucleotide
cgccuggucaggccgccaa

SEQ ID NO: 860 - RNA, 19 nt, Artificial Sequence
  Description of Artificial Sequence: Synthetic oligonucleotide
gccuggucaggccgccaau

SEQ ID NO: 861 - RNA, 19 nt, Artificial Sequence
  Description of Artificial Sequence: Synthetic oligonucleotide
ccuggucaggccgccaauc

SEQ ID NO: 862 - RNA, 19 nt, Artificial Sequence
  Description of Artificial Sequence: Synthetic oligonucleotide
cuggucaggccgccaaucg

SEQ ID NO: 863 - RNA, 19 nt, Artificial Sequence
  Description of Artificial Sequence: Synthetic oligonucleotide
uggucaggccgccaaucga

SEQ ID NO: 864 - RNA, 19 nt, Artificial Sequence
  Description of Artificial Sequence: Synthetic oligonucleotide
ggucaggccgccaaucgau

SEQ ID NO: 865 - RNA, 19 nt, Artificial Sequence
  Description of Artificial Sequence: Synthetic oligonucleotide
gucaggccgccaaucgauc

SEQ ID NO: 866 - RNA, 19 nt, Artificial Sequence
  Description of Artificial Sequence: Synthetic oligonucleotide
ucaggccgccaaucgaucu

SEQ ID NO: 867 - RNA, 19 nt, Artificial Sequence
  Description of Artificial Sequence: Synthetic oligonucleotide
caggccgccaaucgaucug

SEQ ID NO: 868 - RNA, 19 nt, Artificial Sequence
  Description of Artificial Sequence: Synthetic oligonucleotide
aggccgccaaucgaucugc

SEQ ID NO: 869 - RNA, 19 nt, Artificial Sequence
  Description of Artificial Sequence: Synthetic oligonucleotide
ggccgccaaucgaucugcg

SEQ ID NO: 870 - RNA, 19 nt, Artificial Sequence
  Description of Artificial Sequence: Synthetic oligonucleotide
gccgccaaucgaucugcgg

SEQ ID NO: 871 - RNA, 19 nt, Artificial Sequence
  Description of Artificial Sequence: Synthetic oligonucleotide
ccgccaaucgaucugcggg

SEQ ID NO: 872 - RNA, 19 nt, Artificial Sequence
  Description of Artificial Sequence: Synthetic oligonucleotide
cgccaaucgaucugcgggc

SEQ ID NO: 873 - RNA, 19 nt, Artificial Sequence
  Description of Artificial Sequence: Synthetic oligonucleotide
gccaaucgaucugcgggca

SEQ ID NO: 874 - RNA, 19 nt, Artificial Sequence
  Description of Artificial Sequence: Synthetic oligonucleotide
ccaaucgaucugcgggcau

SEQ ID NO: 875 - RNA, 19 nt, Artificial Sequence
  Description of Artificial Sequence: Synthetic oligonucleotide
caaucgaucugcgggcaug

SEQ ID NO: 876 - RNA, 19 nt, Artificial Sequence
  Description of Artificial Sequence: Synthetic oligonucleotide
aaucgaucugcgggcaugu

SEQ ID NO: 877 - RNA, 19 nt, Artificial Sequence
  Description of Artificial Sequence: Synthetic oligonucleotide
aucgaucugcgggcaugua

SEQ ID NO: 878 - RNA, 19 nt, Artificial Sequence
  Description of Artificial Sequence: Synthetic oligonucleotide
ucgaucugcgggcauguac

SEQ ID NO: 879 - RNA, 19 nt, Artificial Sequence
  Description of Artificial Sequence: Synthetic oligonucleotide
cgaucugcgggcauguacc

SEQ ID NO: 880 - RNA, 19 nt, Artificial Sequence
  Description of Artificial Sequence: Synthetic oligonucleotide
gaucugcgggcauguacca

SEQ ID NO: 881 - RNA, 19 nt, Artificial Sequence
  Description of Artificial Sequence: Synthetic oligonucleotide
aucugcgggcauguaccaa

SEQ ID NO: 882 - RNA, 19 nt, Artificial Sequence
  Description of Artificial Sequence: Synthetic oligonucleotide
ucugcgggcauguaccaag

SEQ ID NO: 883 - RNA, 19 nt, Artificial Sequence
  Description of Artificial Sequence: Synthetic oligonucleotide
cugcgggcauguaccaagg

SEQ ID NO: 884 - RNA, 19 nt, Artificial Sequence
  Description of Artificial Sequence: Synthetic oligonucleotide
ugcgggcauguaccaagga

SEQ ID NO: 885 - RNA, 19 nt, Artificial Sequence
  Description of Artificial Sequence: Synthetic oligonucleotide
gcgggcauguaccaaggac

SEQ ID NO: 886 - RNA, 19 nt, Artificial Sequence
  Description of Artificial Sequence: Synthetic oligonucleotide
cgggcauguaccaaggacu

SEQ ID NO: 887 - RNA, 19 nt, Artificial Sequence
  Description of Artificial Sequence: Synthetic oligonucleotide
gggcauguaccaaggacug

SEQ ID NO: 888 - RNA, 19 nt, Artificial Sequence
  Description of Artificial Sequence: Synthetic oligonucleotide
ggcauguaccaaggacugg

SEQ ID NO: 889 - RNA, 19 nt, Artificial Sequence
  Description of Artificial Sequence: Synthetic oligonucleotide
gcauguaccaaggacuggc

SEQ ID NO: 890 - RNA, 19 nt, Artificial Sequence
  Description of Artificial Sequence: Synthetic oligonucleotide
cauguaccaaggacuggca

SEQ ID NO: 891 - RNA, 19 nt, Artificial Sequence
  Description of Artificial Sequence: Synthetic oligonucleotide
auguaccaaggacuggcau

SEQ ID NO: 892 - RNA, 19 nt, Artificial Sequence
  Description of Artificial Sequence: Synthetic oligonucleotide
uguaccaaggacuggcauu

SEQ ID NO: 893 - RNA, 19 nt, Artificial Sequence
  Description of Artificial Sequence: Synthetic oligonucleotide
guaccaaggacuggcauuc

SEQ ID NO: 894 - RNA, 19 nt, Artificial Sequence
  Description of Artificial Sequence: Synthetic oligonucleotide
uaccaaggacuggcauucg

SEQ ID NO: 895 - RNA, 19 nt, Artificial Sequence
  Description of Artificial Sequence: Synthetic oligonucleotide
accaaggacuggcauucgg

SEQ ID NO: 896 - RNA, 19 nt, Artificial Sequence
  Description of Artificial Sequence: Synthetic oligonucleotide
ccaaggacuggcauucggc

SEQ ID NO: 897 - RNA, 19 nt, Artificial Sequence
  Description of Artificial Sequence: Synthetic oligonucleotide
caaggacuggcauucggcg

SEQ ID NO: 898 - RNA, 19 nt, Artificial Sequence
  Description of Artificial Sequence: Synthetic oligonucleotide
aaggacuggcauucggcgg

SEQ ID NO: 899 - RNA, 19 nt, Artificial Sequence
  Description of Artificial Sequence: Synthetic oligonucleotide
aggacuggcauucggcggc

SEQ ID NO: 900 - RNA, 19 nt, Artificial Sequence
  Description of Artificial Sequence: Synthetic oligonucleotide
ggacuggcauucggcggca

SEQ ID NO: 901 - RNA, 19 nt, Artificial Sequence
  Description of Artificial Sequence: Synthetic oligonucleotide
gacuggcauucggcggcag

SEQ ID NO: 902 - RNA, 19 nt, Artificial Sequence
  Description of Artificial Sequence: Synthetic oligonucleotide
acuggcauucggcggcagu

SEQ ID NO: 903 - RNA, 19 nt, Artificial Sequence
  Description of Artificial Sequence: Synthetic oligonucleotide
cuggcauucggcggcagua

SEQ ID NO: 904 - RNA, 19 nt, Artificial Sequence
  Description of Artificial Sequence: Synthetic oligonucleotide
uggcauucggcggcaguaa

SEQ ID NO: 905 - RNA, 19 nt, Artificial Sequence
  Description of Artificial Sequence: Synthetic oligonucleotide
ggcauucggcggcaguaag

SEQ ID NO: 906 - RNA, 19 nt, Artificial Sequence
  Description of Artificial Sequence: Synthetic oligonucleotide
gcauucggcggcaguaaga

SEQ ID NO: 907 - RNA, 19 nt, Artificial Sequence
  Description of Artificial Sequence: Synthetic oligonucleotide
cauucggcggcaguaagaa

SEQ ID NO: 908 - RNA, 19 nt, Artificial Sequence
  Description of Artificial Sequence: Synthetic oligonucleotide
auucggcggcaguaagaag

SEQ ID NO: 909 - RNA, 19 nt, Artificial Sequence
  Description of Artificial Sequence: Synthetic oligonucleotide
uucggcggcaguaagaagg

SEQ ID NO: 910 - RNA, 19 nt, Artificial Sequence
  Description of Artificial Sequence: Synthetic oligonucleotide
ucggcggcaguaagaaggg

SEQ ID NO: 911 - RNA, 19 nt, Artificial Sequence
  Description of Artificial Sequence: Synthetic oligonucleotide
cggcggcaguaagaagggc

SEQ ID NO: 912 - RNA, 19 nt, Artificial Sequence
  Description of Artificial Sequence: Synthetic oligonucleotide
ggcggcaguaagaagggca

SEQ ID NO: 913 - RNA, 19 nt, Artificial Sequence
  Description of Artificial Sequence: Synthetic oligonucleotide
gcggcaguaagaagggcaa

SEQ ID NO: 914 - RNA, 19 nt, Artificial Sequence
  Description of Artificial Sequence: Synthetic oligonucleotide
cggcaguaagaagggcaaa

SEQ ID NO: 915 - RNA, 19 nt, Artificial Sequence
  Description of Artificial Sequence: Synthetic oligonucleotide
ggcaguaagaagggcaaaa

SEQ ID NO: 916 - RNA, 19 nt, Artificial Sequence
  Description of Artificial Sequence: Synthetic oligonucleotide
gcaguaagaagggcaaaaa

SEQ ID NO: 917 - RNA, 19 nt, Artificial Sequence
  Description of Artificial Sequence: Synthetic oligonucleotide
caguaagaagggcaaaaac

SEQ ID NO: 918 - RNA, 19 nt, Artificial Sequence
  Description of Artificial Sequence: Synthetic oligonucleotide
aguaagaagggcaaaaacc

SEQ ID NO: 919 - RNA, 19 nt, Artificial Sequence
  Description of Artificial Sequence: Synthetic oligonucleotide
guaagaagggcaaaaaccu

SEQ ID NO: 920 - RNA, 19 nt, Artificial Sequence
  Description of Artificial Sequence: Synthetic oligonucleotide
uaagaagggcaaaaaccug

SEQ ID NO: 921 - RNA, 19 nt, Artificial Sequence
  Description of Artificial Sequence: Synthetic oligonucleotide
aagaagggcaaaaaccugg

SEQ ID NO: 922 - RNA, 19 nt, Artificial Sequence
  Description of Artificial Sequence: Synthetic oligonucleotide
agaagggcaaaaaccuggg

SEQ ID NO: 923 - RNA, 19 nt, Artificial Sequence
  Description of Artificial Sequence: Synthetic oligonucleotide
gaagggcaaaaaccugggg

SEQ ID NO: 924 - RNA, 19 nt, Artificial Sequence
  Description of Artificial Sequence: Synthetic oligonucleotide
aagggcaaaaaccuggggc

SEQ ID NO: 925 - RNA, 19 nt, Artificial Sequence
  Description of Artificial Sequence: Synthetic oligonucleotide
agggcaaaaaccuggggca

SEQ ID NO: 926 - RNA, 19 nt, Artificial Sequence
  Description of Artificial Sequence: Synthetic oligonucleotide
gggcaaaaaccuggggcag

SEQ ID NO: 927 - RNA, 19 nt, Artificial Sequence
  Description of Artificial Sequence: Synthetic oligonucleotide
ggcaaaaaccuggggcagg

SEQ ID NO: 928 - RNA, 19 nt, Artificial Sequence
  Description of Artificial Sequence: Synthetic oligonucleotide
gcaaaaaccuggggcaggc

SEQ ID NO: 929 - RNA, 19 nt, Artificial Sequence
  Description of Artificial Sequence: Synthetic oligonucleotide
caaaaaccuggggcaggcc

SEQ ID NO: 930 - RNA, 19 nt, Artificial Sequence
  Description of Artificial Sequence: Synthetic oligonucleotide
aaaaaccuggggcaggccu

SEQ ID NO: 931 - RNA, 19 nt, Artificial Sequence
  Description of Artificial Sequence: Synthetic oligonucleotide
aaaaccuggggcaggccua

SEQ ID NO: 932 - RNA, 19 nt, Artificial Sequence
  Description of Artificial Sequence: Synthetic oligonucleotide
aaaccuggggcaggccuac

SEQ ID NO: 933 - RNA, 19 nt, Artificial Sequence
  Description of Artificial Sequence: Synthetic oligonucleotide
aaccuggggcaggccuacc

SEQ ID NO: 934 - RNA, 19 nt, Artificial Sequence
  Description of Artificial Sequence: Synthetic oligonucleotide
accuggggcaggccuaccc

SEQ ID NO: 935 - RNA, 19 nt, Artificial Sequence
  Description of Artificial Sequence: Synthetic oligonucleotide
ccuggggcaggccuacccu

SEQ ID NO: 936 - RNA, 19 nt, Artificial Sequence
  Description of Artificial Sequence: Synthetic oligonucleotide
cuggggcaggccuacccuu

SEQ ID NO: 937 - RNA, 19 nt, Artificial Sequence
  Description of Artificial Sequence: Synthetic oligonucleotide
uggggcaggccuacccuug

SEQ ID NO: 938 - RNA, 19 nt, Artificial Sequence
  Description of Artificial Sequence: Synthetic oligonucleotide
ggggcaggccuacccuugu

SEQ ID NO: 939 - RNA, 19 nt, Artificial Sequence
  Description of Artificial Sequence: Synthetic oligonucleotide
gggcaggccuacccuugua

SEQ ID NO: 940 - RNA, 19 nt, Artificial Sequence
  Description of Artificial Sequence: Synthetic oligonucleotide
ggcaggccuacccuuguag

SEQ ID NO: 941 - RNA, 19 nt, Artificial Sequence
  Description of Artificial Sequence: Synthetic oligonucleotide
gcaggccuacccuuguagc

SEQ ID NO: 942 - RNA, 19 nt, Artificial Sequence
  Description of Artificial Sequence: Synthetic oligonucleotide
caggccuacccuuguagca

SEQ ID NO: 943 - RNA, 19 nt, Artificial Sequence
  Description of Artificial Sequence: Synthetic oligonucleotide
aggccuacccuuguagcag

SEQ ID NO: 944 - RNA, 19 nt, Artificial Sequence
  Description of Artificial Sequence: Synthetic oligonucleotide
ggccuacccuuguagcagu

SEQ ID NO: 945 - RNA, 19 nt, Artificial Sequence
  Description of Artificial Sequence: Synthetic oligonucleotide
gccuacccuuguagcagug

SEQ ID NO: 946 - RNA, 19 nt, Artificial Sequence
  Description of Artificial Sequence: Synthetic oligonucleotide
ccuacccuuguagcaguga

SEQ ID NO: 947 - RNA, 19 nt, Artificial Sequence
  Description of Artificial Sequence: Synthetic oligonucleotide
cuacccuuguagcagugau

SEQ ID NO: 948 - RNA, 19 nt, Artificial Sequence
  Description of Artificial Sequence: Synthetic oligonucleotide
uacccuuguagcagugaua

SEQ ID NO: 949 - RNA, 19 nt, Artificial Sequence
  Description of Artificial Sequence: Synthetic oligonucleotide
acccuuguagcagugauaa

SEQ ID NO: 950 - RNA, 19 nt, Artificial Sequence
  Description of Artificial Sequence: Synthetic oligonucleotide
cccuuguagcagugauaag

SEQ ID NO: 951 - RNA, 19 nt, Artificial Sequence
  Description of Artificial Sequence: Synthetic oligonucleotide
ccuuguagcagugauaagg

SEQ ID NO: 952 - RNA, 19 nt, Artificial Sequence
  Description of Artificial Sequence: Synthetic oligonucleotide
cuuguagcagugauaagga

SEQ ID NO: 953 - RNA, 19 nt, Artificial Sequence
  Description of Artificial Sequence: Synthetic oligonucleotide
uuguagcagugauaaggag

SEQ ID NO: 954 - RNA, 19 nt, Artificial Sequence
  Description of Artificial Sequence: Synthetic oligonucleotide
uguagcagugauaaggagu

SEQ ID NO: 955 - RNA, 19 nt, Artificial Sequence
  Description of Artificial Sequence: Synthetic oligonucleotide
guagcagugauaaggagug

SEQ ID NO: 956 - RNA, 19 nt, Artificial Sequence
  Description of Artificial Sequence: Synthetic oligonucleotide
uagcagugauaaggagugu

SEQ ID NO: 957 - RNA, 19 nt, Artificial Sequence
  Description of Artificial Sequence: Synthetic oligonucleotide
agcagugauaaggagugug

SEQ ID NO: 958 - RNA, 19 nt, Artificial Sequence
  Description of Artificial Sequence: Synthetic oligonucleotide
gcagugauaaggaguguga

SEQ ID NO: 959 - RNA, 19 nt, Artificial Sequence
  Description of Artificial Sequence: Synthetic oligonucleotide
cagugauaaggagugugaa

SEQ ID NO: 960 - RNA, 19 nt, Artificial Sequence
  Description of Artificial Sequence: Synthetic oligonucleotide
agugauaaggagugugaag

SEQ ID NO: 961 - RNA, 19 nt, Artificial Sequence
  Description of Artificial Sequence: Synthetic oligonucleotide
gugauaaggagugugaagu

SEQ ID NO: 962 - RNA, 19 nt, Artificial Sequence
  Description of Artificial Sequence: Synthetic oligonucleotide
ugauaaggagugugaaguu

SEQ ID NO: 963 - RNA, 19 nt, Artificial Sequence
  Description of Artificial Sequence: Synthetic oligonucleotide
gauaaggagugugaaguug

SEQ ID NO: 964 - RNA, 19 nt, Artificial Sequence
  Description of Artificial Sequence: Synthetic oligonucleotide
auaaggagugugaaguugg

SEQ ID NO: 965 - RNA, 19 nt, Artificial Sequence
  Description of Artificial Sequence: Synthetic oligonucleotide
uaaggagugugaaguuggg

SEQ ID NO: 966 - RNA, 19 nt, Artificial Sequence
  Description of Artificial Sequence: Synthetic oligonucleotide
aaggagugugaaguuggga

SEQ ID NO: 967 - RNA, 19 nt, Artificial Sequence
  Description of Artificial Sequence: Synthetic oligonucleotide
aggagugugaaguugggag

SEQ ID NO: 968 - RNA, 19 nt, Artificial Sequence
  Description of Artificial Sequence: Synthetic oligonucleotide
ggagugugaaguugggagg

SEQ ID NO: 969 - RNA, 19 nt, Artificial Sequence
  Description of Artificial Sequence: Synthetic oligonucleotide
gagugugaaguugggaggu

SEQ ID NO: 970 - RNA, 19 nt, Artificial Sequence
  Description of Artificial Sequence: Synthetic oligonucleotide
agugugaaguugggaggua

SEQ ID NO: 971 - RNA, 19 nt, Artificial Sequence
  Description of Artificial Sequence: Synthetic oligonucleotide
gugugaaguugggagguau

SEQ ID NO: 972 - RNA, 19 nt, Artificial Sequence
  Description of Artificial Sequence: Synthetic oligonucleotide
ugugaaguugggagguauu

SEQ ID NO: 973 - RNA, 19 nt, Artificial Sequence
  Description of Artificial Sequence: Synthetic oligonucleotide
gugaaguugggagguauug

SEQ ID NO: 974 - RNA, 19 nt, Artificial Sequence
  Description of Artificial Sequence: Synthetic oligonucleotide
ugaaguugggagguauugc

SEQ ID NO: 975 - RNA, 19 nt, Artificial Sequence
  Description of Artificial Sequence: Synthetic oligonucleotide
gaaguugggagguauugcc

SEQ ID NO: 976 - RNA, 19 nt, Artificial Sequence
  Description of Artificial Sequence: Synthetic oligonucleotide
aaguugggagguauugcca

SEQ ID NO: 977 - RNA, 19 nt, Artificial Sequence
  Description of Artificial Sequence: Synthetic oligonucleotide
aguugggagguauugccac

SEQ ID NO: 978 - RNA, 19 nt, Artificial Sequence
  Description of Artificial Sequence: Synthetic oligonucleotide
guugggagguauugccaca

SEQ ID NO: 979 - RNA, 19 nt, Artificial Sequence
  Description of Artificial Sequence: Synthetic oligonucleotide
uugggagguauugccacag

SEQ ID NO: 980 - RNA, 19 nt, Artificial Sequence
  Description of Artificial Sequence: Synthetic oligonucleotide
ugggagguauugccacagu

SEQ ID NO: 981 - RNA, 19 nt, Artificial Sequence
  Description of Artificial Sequence: Synthetic oligonucleotide
gggagguauugccacaguc

SEQ ID NO: 982 - RNA, 19 nt, Artificial Sequence
  Description of Artificial Sequence: Synthetic oligonucleotide
ggagguauugccacagucc

SEQ ID NO: 983 - RNA, 19 nt, Artificial Sequence
  Description of Artificial Sequence: Synthetic oligonucleotide
gagguauugccacaguccc

SEQ ID NO: 984 - RNA, 19 nt, Artificial Sequence
  Description of Artificial Sequence: Synthetic oligonucleotide
agguauugccacagucccc

SEQ ID NO: 985 - RNA, 19 nt, Artificial Sequence
  Description of Artificial Sequence: Synthetic oligonucleotide
gguauugccacagucccca

SEQ ID NO: 986 - RNA, 19 nt, Artificial Sequence
  Description of Artificial Sequence: Synthetic oligonucleotide
guauugccacaguccccac

SEQ ID NO: 987 - RNA, 19 nt, Artificial Sequence
  Description of Artificial Sequence: Synthetic oligonucleotide
uauugccacaguccccacc

SEQ ID NO: 988 - RNA, 19 nt, Artificial Sequence
  Description of Artificial Sequence: Synthetic oligonucleotide
auugccacaguccccacca

SEQ ID NO: 989 - RNA, 19 nt, Artificial Sequence
  Description of Artificial Sequence: Synthetic oligonucleotide
uugccacaguccccaccaa

SEQ ID NO: 990 - RNA, 19 nt, Artificial Sequence
  Description of Artificial Sequence: Synthetic oligonucleotide
ugccacaguccccaccaag

SEQ ID NO: 991 - RNA, 19 nt, Artificial Sequence
  Description of Artificial Sequence: Synthetic oligonucleotide
gccacaguccccaccaagg

SEQ ID NO: 992 - RNA, 19 nt, Artificial Sequence
  Description of Artificial Sequence: Synthetic oligonucleotide
ccacaguccccaccaagga

SEQ ID NO: 993 - RNA, 19 nt, Artificial Sequence
  Description of Artificial Sequence: Synthetic oligonucleotide
cacaguccccaccaaggau

SEQ ID NO: 994 - RNA, 19 nt, Artificial Sequence
  Description of Artificial Sequence: Synthetic oligonucleotide
acaguccccaccaaggauc

SEQ ID NO: 995 - RNA, 19 nt, Artificial Sequence
  Description of Artificial Sequence: Synthetic oligonucleotide
caguccccaccaaggauca

SEQ ID NO: 996 - RNA, 19 nt, Artificial Sequence
  Description of Artificial Sequence: Synthetic oligonucleotide
aguccccaccaaggaucau

SEQ ID NO: 997 - RNA, 19 nt, Artificial Sequence
  Description of Artificial Sequence: Synthetic oligonucleotide
guccccaccaaggaucauc

SEQ ID NO: 998 - RNA, 19 nt, Artificial Sequence
  Description of Artificial Sequence: Synthetic oligonucleotide
uccccaccaaggaucaucg

SEQ ID NO: 999 - RNA, 19 nt, Artificial Sequence
  Description of Artificial Sequence: Synthetic oligonucleotide
ccccaccaaggaucaucgg

SEQ ID NO: 1000 - RNA, 19 nt, Artificial Sequence
  Description of Artificial Sequence: Synthetic oligonucleotide
cccaccaaggaucaucggc

SEQ ID NO: 1001 - RNA, 19 nt, Artificial Sequence
  Description of Artificial Sequence: Synthetic oligonucleotide
ccaccaaggaucaucggcc

SEQ ID NO: 1002 - RNA, 19 nt, Artificial Sequence
  Description of Artificial Sequence: Synthetic oligonucleotide
caccaaggaucaucggccu

SEQ ID NO: 1003 - RNA, 19 nt, Artificial Sequence
  Description of Artificial Sequence: Synthetic oligonucleotide
accaaggaucaucggccug

SEQ ID NO: 1004 - RNA, 19 nt, Artificial Sequence
  Description of Artificial Sequence: Synthetic oligonucleotide
ccaaggaucaucggccugc

SEQ ID NO: 1005 - RNA, 19 nt, Artificial Sequence
  Description of Artificial Sequence: Synthetic oligonucleotide
caaggaucaucggccugca

SEQ ID NO: 1006 - RNA, 19 nt, Artificial Sequence
  Description of Artificial Sequence: Synthetic oligonucleotide
aaggaucaucggccugcau

SEQ ID NO: 1007 - RNA, 19 nt, Artificial Sequence
  Description of Artificial Sequence: Synthetic oligonucleotide
aggaucaucggccugcaug

SEQ ID NO: 1008 - RNA, 19 nt, Artificial Sequence
  Description of Artificial Sequence: Synthetic oligonucleotide
ggaucaucggccugcaugg

SEQ ID NO: 1009 - RNA, 19 nt, Artificial Sequence
  Description of Artificial Sequence: Synthetic oligonucleotide
gaucaucggccugcauggu

SEQ ID NO: 1010 - RNA, 19 nt, Artificial Sequence
  Description of Artificial Sequence: Synthetic oligonucleotide
aucaucggccugcauggug

SEQ ID NO: 1011 - RNA, 19 nt, Artificial Sequence
  Description of Artificial Sequence: Synthetic oligonucleotide
ucaucggccugcauggugu

SEQ ID NO: 1012 - RNA, 19 nt, Artificial Sequence
  Description of Artificial Sequence: Synthetic oligonucleotide
caucggccugcauggugug

SEQ ID NO: 1013 - RNA, 19 nt, Artificial Sequence
  Description of Artificial Sequence: Synthetic oligonucleotide
aucggccugcauggugugu

SEQ ID NO: 1014 - RNA, 19 nt, Artificial Sequence
  Description of Artificial Sequence: Synthetic oligonucleotide
ucggccugcaugguguguc

SEQ ID NO: 1015 - RNA, 19 nt, Artificial Sequence
  Description of Artificial Sequence: Synthetic oligonucleotide
cggccugcauggugugucg

SEQ ID NO: 1016 - RNA, 19 nt, Artificial Sequence
  Description of Artificial Sequence: Synthetic oligonucleotide
ggccugcauggugugucgg

SEQ ID NO: 1017 - RNA, 19 nt, Artificial Sequence
  Description of Artificial Sequence: Synthetic oligonucleotide
gccugcauggugugucgga

SEQ ID NO: 1018 - RNA, 19 nt, Artificial Sequence
  Description of Artificial Sequence: Synthetic oligonucleotide
ccugcauggugugucggag

SEQ ID NO: 1019 - RNA, 19 nt, Artificial Sequence
  Description of Artificial Sequence: Synthetic oligonucleotide
cugcauggugugucggaga

SEQ ID NO: 1020 - RNA, 19 nt, Artificial Sequence
  Description of Artificial Sequence: Synthetic oligonucleotide
ugcauggugugucggagaa

SEQ ID NO: 1021 - RNA, 19 nt, Artificial Sequence
  Description of Artificial Sequence: Synthetic oligonucleotide
gcauggugugucggagaaa

SEQ ID NO: 1022 - RNA, 19 nt, Artificial Sequence
  Description of Artificial Sequence: Synthetic oligonucleotide
cauggugugucggagaaaa

SEQ ID NO: 1023 - RNA, 19 nt, Artificial Sequence
  Description of Artificial Sequence: Synthetic oligonucleotide
auggugugucggagaaaaa

SEQ ID NO: 1024 - RNA, 19 nt, Artificial Sequence
  Description of Artificial Sequence: Synthetic oligonucleotide
uggugugucggagaaaaaa

SEQ ID NO: 1025 - RNA, 19 nt, Artificial Sequence
  Description of Artificial Sequence: Synthetic oligonucleotide
ggugugucggagaaaaaag

SEQ ID NO: 1026 - RNA, 19 nt, Artificial Sequence
  Description of Artificial Sequence: Synthetic oligonucleotide
gugugucggagaaaaaaga

SEQ ID NO: 1027 - RNA, 19 nt, Artificial Sequence
  Description of Artificial Sequence: Synthetic oligonucleotide
ugugucggagaaaaaagaa

SEQ ID NO: 1028 - RNA, 19 nt, Artificial Sequence
  Description of Artificial Sequence: Synthetic oligonucleotide
gugucggagaaaaaagaag

SEQ ID NO: 1029 - RNA, 19 nt, Artificial Sequence
  Description of Artificial Sequence: Synthetic oligonucleotide
ugucggagaaaaaagaagc

SEQ ID NO: 1030 - RNA, 19 nt, Artificial Sequence
  Description of Artificial Sequence: Synthetic oligonucleotide
gucggagaaaaaagaagcg

SEQ ID NO: 1031 - RNA, 19 nt, Artificial Sequence
  Description of Artificial Sequence: Synthetic oligonucleotide
ucggagaaaaaagaagcgc

SEQ ID NO: 1032 - RNA, 19 nt, Artificial Sequence
  Description of Artificial Sequence: Synthetic oligonucleotide
cggagaaaaaagaagcgcu

SEQ ID NO: 1033 - RNA, 19 nt, Artificial Sequence
  Description of Artificial Sequence: Synthetic oligonucleotide
ggagaaaaaagaagcgcug

SEQ ID NO: 1034 - RNA, 19 nt, Artificial Sequence
  Description of Artificial Sequence: Synthetic oligonucleotide
gagaaaaaagaagcgcugc

SEQ ID NO: 1035 - RNA, 19 nt, Artificial Sequence
  Description of Artificial Sequence: Synthetic oligonucleotide
agaaaaaagaagcgcugcc

SEQ ID NO: 1036 - RNA, 19 nt, Artificial Sequence
  Description of Artificial Sequence: Synthetic oligonucleotide
gaaaaaagaagcgcugcca

SEQ ID NO: 1037 - RNA, 19 nt, Artificial Sequence
  Description of Artificial Sequence: Synthetic oligonucleotide
aaaaaagaagcgcugccac

SEQ ID NO: 1038 - RNA, 19 nt, Artificial Sequence
  Description of Artificial Sequence: Synthetic oligonucleotide
aaaaagaagcgcugccacc

SEQ ID NO: 1039 - RNA, 19 nt, Artificial Sequence
  Description of Artificial Sequence: Synthetic oligonucleotide
aaaagaagcgcugccaccg

SEQ ID NO: 1040 - RNA, 19 nt, Artificial Sequence
  Description of Artificial Sequence: Synthetic oligonucleotide
aaagaagcgcugccaccga

SEQ ID NO: 1041 - RNA, 19 nt, Artificial Sequence
  Description of Artificial Sequence: Synthetic oligonucleotide
aagaagcgcugccaccgag

SEQ ID NO: 1042 - RNA, 19 nt, Artificial Sequence
  Description of Artificial Sequence: Synthetic oligonucleotide
agaagcgcugccaccgaga

SEQ ID NO: 1043 - RNA, 19 nt, Artificial Sequence
  Description of Artificial Sequence: Synthetic oligonucleotide
gaagcgcugccaccgagau

SEQ ID NO: 1044 - RNA, 19 nt, Artificial Sequence
  Description of Artificial Sequence: Synthetic oligonucleotide
aagcgcugccaccgagaug

SEQ ID NO: 1045 - RNA, 19 nt, Artificial Sequence
  Description of Artificial Sequence: Synthetic oligonucleotide
agcgcugccaccgagaugg

SEQ ID NO: 1046 - RNA, 19 nt, Artificial Sequence
  Description of Artificial Sequence: Synthetic oligonucleotide
gcgcugccaccgagauggc

SEQ ID NO: 1047 - RNA, 19 nt, Artificial Sequence
  Description of Artificial Sequence: Synthetic oligonucleotide
cgcugccaccgagauggca

SEQ ID NO: 1048 - RNA, 19 nt, Artificial Sequence
  Description of Artificial Sequence: Synthetic oligonucleotide
gcugccaccgagauggcau

SEQ ID NO: 1049 - RNA, 19 nt, Artificial Sequence
  Description of Artificial Sequence: Synthetic oligonucleotide
cugccaccgagauggcaug

SEQ ID NO: 1050 - RNA, 19 nt, Artificial Sequence
  Description of Artificial Sequence: Synthetic oligonucleotide
ugccaccgagauggcaugu

SEQ ID NO: 1051 - RNA, 19 nt, Artificial Sequence
  Description of Artificial Sequence: Synthetic oligonucleotide
gccaccgagauggcaugug

SEQ ID NO: 1052 - RNA, 19 nt, Artificial Sequence
  Description of Artificial Sequence: Synthetic oligonucleotide
ccaccgagauggcaugugc

SEQ ID NO: 1053 - RNA, 19 nt, Artificial Sequence
  Description of Artificial Sequence: Synthetic oligonucleotide
caccgagauggcaugugcu

SEQ ID NO: 1054 - RNA, 19 nt, Artificial Sequence
  Description of Artificial Sequence: Synthetic oligonucleotide
accgagauggcaugugcug

SEQ ID NO: 1055 - RNA, 19 nt, Artificial Sequence
  Description of Artificial Sequence: Synthetic oligonucleotide
ccgagauggcaugugcugc

SEQ ID NO: 1056 - RNA, 19 nt, Artificial Sequence
  Description of Artificial Sequence: Synthetic oligonucleotide
cgagauggcaugugcugcc

SEQ ID NO: 1057 - RNA, 19 nt, Artificial Sequence
  Description of Artificial Sequence: Synthetic oligonucleotide
gagauggcaugugcugccc

SEQ ID NO: 1058 - RNA, 19 nt, Artificial Sequence
  Description of Artificial Sequence: Synthetic oligonucleotide
agauggcaugugcugcccc

SEQ ID NO: 1059 - RNA, 19 nt, Artificial Sequence
  Description of Artificial Sequence: Synthetic oligonucleotide
gauggcaugugcugcccca

SEQ ID NO: 1060 - RNA, 19 nt, Artificial Sequence
  Description of Artificial Sequence: Synthetic oligonucleotide
auggcaugugcugccccag

SEQ ID NO: 1061 - RNA, 19 nt, Artificial Sequence
  Description of Artificial Sequence: Synthetic oligonucleotide
uggcaugugcugccccagu

SEQ ID NO: 1062 - RNA, 19 nt, Artificial Sequence
  Description of Artificial Sequence: Synthetic oligonucleotide
ggcaugugcugccccagua

SEQ ID NO: 1063 - RNA, 19 nt, Artificial Sequence
  Description of Artificial Sequence: Synthetic oligonucleotide
gcaugugcugccccaguac

SEQ ID NO: 1064 - RNA, 19 nt, Artificial Sequence
  Description of Artificial Sequence: Synthetic oligonucleotide
caugugcugccccaguacc

SEQ ID NO: 1065 - RNA, 19 nt, Artificial Sequence
  Description of Artificial Sequence: Synthetic oligonucleotide
augugcugccccaguaccc

SEQ ID NO: 1066 - RNA, 19 nt, Artificial Sequence
  Description of Artificial Sequence: Synthetic oligonucleotide
ugugcugccccaguacccg

SEQ ID NO: 1067 - RNA, 19 nt, Artificial Sequence
  Description of Artificial Sequence: Synthetic oligonucleotide
gugcugccccaguacccgc

SEQ ID NO: 1068 - RNA, 19 nt, Artificial Sequence
  Description of Artificial Sequence: Synthetic oligonucleotide
ugcugccccaguacccgcu

SEQ ID NO: 1069 - RNA, 19 nt, Artificial Sequence
  Description of Artificial Sequence: Synthetic oligonucleotide
gcugccccaguacccgcug

SEQ ID NO: 1070 - RNA, 19 nt, Artificial Sequence
  Description of Artificial Sequence: Synthetic oligonucleotide
cugccccaguacccgcugc

SEQ ID NO: 1071 - RNA, 19 nt, Artificial Sequence
  Description of Artificial Sequence: Synthetic oligonucleotide
ugccccaguacccgcugca

SEQ ID NO: 1072 - RNA, 19 nt, Artificial Sequence
  Description of Artificial Sequence: Synthetic oligonucleotide
gccccaguacccgcugcaa

SEQ ID NO: 1073 - RNA, 19 nt, Artificial Sequence
  Description of Artificial Sequence: Synthetic oligonucleotide
ccccaguacccgcugcaau

SEQ ID NO: 1074 - RNA, 19 nt, Artificial Sequence
  Description of Artificial Sequence: Synthetic oligonucleotide
cccaguacccgcugcaaua

SEQ ID NO: 1075 - RNA, 19 nt, Artificial Sequence
  Description of Artificial Sequence: Synthetic oligonucleotide
ccaguacccgcugcaauaa

SEQ ID NO: 1076 - RNA, 19 nt, Artificial Sequence
  Description of Artificial Sequence: Synthetic oligonucleotide
caguacccgcugcaauaau

SEQ ID NO: 1077 - RNA, 19 nt, Artificial Sequence
  Description of Artificial Sequence: Synthetic oligonucleotide
aguacccgcugcaauaaug

SEQ ID NO: 1078 - RNA, 19 nt, Artificial Sequence
  Description of Artificial Sequence: Synthetic oligonucleotide
guacccgcugcaauaaugg

SEQ ID NO: 1079 - RNA, 19 nt, Artificial Sequence
  Description of Artificial Sequence: Synthetic oligonucleotide
uacccgcugcaauaauggc

SEQ ID NO: 1080 - RNA, 19 nt, Artificial Sequence
  Description of Artificial Sequence: Synthetic oligonucleotide
acccgcugcaauaauggca

SEQ ID NO: 1081 - RNA, 19 nt, Artificial Sequence
  Description of Artificial Sequence: Synthetic oligonucleotide
cccgcugcaauaauggcau

SEQ ID NO: 1082 - RNA, 19 nt, Artificial Sequence
  Description of Artificial Sequence: Synthetic oligonucleotide
ccgcugcaauaauggcauc

SEQ ID NO: 1083 - RNA, 19 nt, Artificial Sequence
  Description of Artificial Sequence: Synthetic oligonucleotide
cgcugcaauaauggcaucu

SEQ ID NO: 1084 - RNA, 19 nt, Artificial Sequence
  Description of Artificial Sequence: Synthetic oligonucleotide
gcugcaauaauggcaucug

SEQ ID NO: 1085 - RNA, 19 nt, Artificial Sequence
  Description of Artificial Sequence: Synthetic oligonucleotide
cugcaauaauggcaucugu

SEQ ID NO: 1086 - RNA, 19 nt, Artificial Sequence
  Description of Artificial Sequence: Synthetic oligonucleotide
ugcaauaauggcaucugua

SEQ ID NO: 1087 - RNA, 19 nt, Artificial Sequence
  Description of Artificial Sequence: Synthetic oligonucleotide
gcaauaauggcaucuguau

SEQ ID NO: 1088 - RNA, 19 nt, Artificial Sequence
  Description of Artificial Sequence: Synthetic oligonucleotide
caauaauggcaucuguauc

SEQ ID NO: 1089 - RNA, 19 nt, Artificial Sequence
  Description of Artificial Sequence: Synthetic oligonucleotide
aauaauggcaucuguaucc

SEQ ID NO: 1090 - RNA, 19 nt, Artificial Sequence
  Description of Artificial Sequence: Synthetic oligonucleotide
auaauggcaucuguauccc

SEQ ID NO: 1091 - RNA, 19 nt, Artificial Sequence
  Description of Artificial Sequence: Synthetic oligonucleotide
uaauggcaucuguauccca

SEQ ID NO: 1092 - RNA, 19 nt, Artificial Sequence
  Description of Artificial Sequence: Synthetic oligonucleotide
aauggcaucuguaucccag

SEQ ID NO: 1093 - RNA, 19 nt, Artificial Sequence
  Description of Artificial Sequence: Synthetic oligonucleotide
auggcaucuguaucccagu

SEQ ID NO: 1094 - RNA, 19 nt, Artificial Sequence
  Description of Artificial Sequence: Synthetic oligonucleotide
uggcaucuguaucccaguu

SEQ ID NO: 1095 - RNA, 19 nt, Artificial Sequence
  Description of Artificial Sequence: Synthetic oligonucleotide
ggcaucuguaucccaguua

SEQ ID NO: 1096 - RNA, 19 nt, Artificial Sequence
  Description of Artificial Sequence: Synthetic oligonucleotide
gcaucuguaucccaguuac

SEQ ID NO: 1097 - RNA, 19 nt, Artificial Sequence
  Description of Artificial Sequence: Synthetic oligonucleotide
caucuguaucccaguuacu

SEQ ID NO: 1098 - RNA, 19 nt, Artificial Sequence
  Description of Artificial Sequence: Synthetic oligonucleotide
aucuguaucccaguuacug

SEQ ID NO: 1099 - RNA, 19 nt, Artificial Sequence
  Description of Artificial Sequence: Synthetic oligonucleotide
ucuguaucccaguuacuga

SEQ ID NO: 1100 - RNA, 19 nt, Artificial Sequence
  Description of Artificial Sequence: Synthetic oligonucleotide
cuguaucccaguuacugaa

SEQ ID NO: 1101 - RNA, 19 nt, Artificial Sequence
  Description of Artificial Sequence: Synthetic oligonucleotide
uguaucccaguuacugaaa

SEQ ID NO: 1102 - RNA, 19 nt, Artificial Sequence
  Description of Artificial Sequence: Synthetic oligonucleotide
guaucccaguuacugaaag

SEQ ID NO: 1103 - RNA, 19 nt, Artificial Sequence
  Description of Artificial Sequence: Synthetic oligonucleotide
uaucccaguuacugaaagc

SEQ ID NO: 1104 - RNA, 19 nt, Artificial Sequence
  Description of Artificial Sequence: Synthetic oligonucleotide
aucccaguuacugaaagca

SEQ ID NO: 1105 - RNA, 19 nt, Artificial Sequence
  Description of Artificial Sequence: Synthetic oligonucleotide
ucccaguuacugaaagcau

SEQ ID NO: 1106 - RNA, 19 nt, Artificial Sequence
  Description of Artificial Sequence: Synthetic oligonucleotide
cccaguuacugaaagcauc

SEQ ID NO: 1107 - RNA, 19 nt, Artificial Sequence
  Description of Artificial Sequence: Synthetic oligonucleotide
ccaguuacugaaagcaucu

SEQ ID NO: 1108 - RNA, 19 nt, Artificial Sequence
  Description of Artificial Sequence: Synthetic oligonucleotide
caguuacugaaagcaucuu

SEQ ID NO: 1109 - RNA, 19 nt, Artificial Sequence
  Description of Artificial Sequence: Synthetic oligonucleotide
aguuacugaaagcaucuua

SEQ ID NO: 1110 - RNA, 19 nt, Artificial Sequence
  Description of Artificial Sequence: Synthetic oligonucleotide
guuacugaaagcaucuuaa

SEQ ID NO: 1111 - RNA, 19 nt, Artificial Sequence
  Description of Artificial Sequence: Synthetic oligonucleotide
uuacugaaagcaucuuaac

SEQ ID NO: 1112 - RNA, 19 nt, Artificial Sequence
  Description of Artificial Sequence: Synthetic oligonucleotide
uacugaaagcaucuuaacc

SEQ ID NO: 1113 - RNA, 19 nt, Artificial Sequence
  Description of Artificial Sequence: Synthetic oligonucleotide
acugaaagcaucuuaaccc

SEQ ID NO: 1114 - RNA, 19 nt, Artificial Sequence
  Description of Artificial Sequence: Synthetic oligonucleotide
cugaaagcaucuuaacccc

SEQ ID NO: 1115 - RNA, 19 nt, Artificial Sequence
  Description of Artificial Sequence: Synthetic oligonucleotide
ugaaagcaucuuaaccccu

SEQ ID NO: 1116 - RNA, 19 nt, Artificial Sequence
  Description of Artificial Sequence: Synthetic oligonucleotide
gaaagcaucuuaaccccuc

SEQ ID NO: 1117 - RNA, 19 nt, Artificial Sequence
  Description of Artificial Sequence: Synthetic oligonucleotide
aaagcaucuuaaccccuca

SEQ ID NO: 1118 - RNA, 19 nt, Artificial Sequence
  Description of Artificial Sequence: Synthetic oligonucleotide
aagcaucuuaaccccucac

SEQ ID NO: 1119 - RNA, 19 nt, Artificial Sequence
  Description of Artificial Sequence: Synthetic oligonucleotide
agcaucuuaaccccucaca

SEQ ID NO: 1120 - RNA, 19 nt, Artificial Sequence
  Description of Artificial Sequence: Synthetic oligonucleotide
gcaucuuaaccccucacau

SEQ ID NO: 1121 - RNA, 19 nt, Artificial Sequence
  Description of Artificial Sequence: Synthetic oligonucleotide
caucuuaaccccucacauc

SEQ ID NO: 1122 - RNA, 19 nt, Artificial Sequence
  Description of Artificial Sequence: Synthetic oligonucleotide
aucuuaaccccucacaucc

SEQ ID NO: 1123 - RNA, 19 nt, Artificial Sequence
  Description of Artificial Sequence: Synthetic oligonucleotide
ucuuaaccccucacauccc

SEQ ID NO: 1124 - RNA, 19 nt, Artificial Sequence
  Description of Artificial Sequence: Synthetic oligonucleotide
cuuaaccccucacaucccg

SEQ ID NO: 1125 - RNA, 19 nt, Artificial Sequence
  Description of Artificial Sequence: Synthetic oligonucleotide
uuaaccccucacaucccgg

SEQ ID NO: 1126 - RNA, 19 nt, Artificial Sequence
  Description of Artificial Sequence: Synthetic oligonucleotide
uaaccccucacaucccggc

SEQ ID NO: 1127 - RNA, 19 nt, Artificial Sequence
  Description of Artificial Sequence: Synthetic oligonucleotide
aaccccucacaucccggcu

SEQ ID NO: 1128 - RNA, 19 nt, Artificial Sequence
  Description of Artificial Sequence: Synthetic oligonucleotide
accccucacaucccggcuc

SEQ ID NO: 1129 - RNA, 19 nt, Artificial Sequence
  Description of Artificial Sequence: Synthetic oligonucleotide
ccccucacaucccggcucu

SEQ ID NO: 1130 - RNA, 19 nt, Artificial Sequence
  Description of Artificial Sequence: Synthetic oligonucleotide
cccucacaucccggcucug

SEQ ID NO: 1131 - RNA, 19 nt, Artificial Sequence
  Description of Artificial Sequence: Synthetic oligonucleotide
ccucacaucccggcucugg

SEQ ID NO: 1132 - RNA, 19 nt, Artificial Sequence
  Description of Artificial Sequence: Synthetic oligonucleotide
cucacaucccggcucugga

SEQ ID NO: 1133 - RNA, 19 nt, Artificial Sequence
  Description of Artificial Sequence: Synthetic oligonucleotide
ucacaucccggcucuggau

SEQ ID NO: 1134 - RNA, 19 nt, Artificial Sequence
  Description of Artificial Sequence: Synthetic oligonucleotide
cacaucccggcucuggaug

SEQ ID NO: 1135 - RNA, 19 nt, Artificial Sequence
  Description of Artificial Sequence: Synthetic oligonucleotide
acaucccggcucuggaugg

SEQ ID NO: 1136 - RNA, 19 nt, Artificial Sequence
  Description of Artificial Sequence: Synthetic oligonucleotide
caucccggcucuggauggu

SEQ ID NO: 1137 - RNA, 19 nt, Artificial Sequence
  Description of Artificial Sequence: Synthetic oligonucleotide
aucccggcucuggauggua

SEQ ID NO: 1138 - RNA, 19 nt, Artificial Sequence
  Description of Artificial Sequence: Synthetic oligonucleotide
ucccggcucuggaugguac

SEQ ID NO: 1139 - RNA, 19 nt, Artificial Sequence
  Description of Artificial Sequence: Synthetic oligonucleotide
cccggcucuggaugguacu

SEQ ID NO: 1140 - RNA, 19 nt, Artificial Sequence
  Description of Artificial Sequence: Synthetic oligonucleotide
ccggcucuggaugguacuc

SEQ ID NO: 1141 - RNA, 19 nt, Artificial Sequence
  Description of Artificial Sequence: Synthetic oligonucleotide
cggcucuggaugguacucg

SEQ ID NO: 1142 - RNA, 19 nt, Artificial Sequence
  Description of Artificial Sequence: Synthetic oligonucleotide
ggcucuggaugguacucgg

SEQ ID NO: 1143 - RNA, 19 nt, Artificial Sequence
  Description of Artificial Sequence: Synthetic oligonucleotide
gcucuggaugguacucggc

SEQ ID NO: 1144 - RNA, 19 nt, Artificial Sequence
  Description of Artificial Sequence: Synthetic oligonucleotide
cucuggaugguacucggca

SEQ ID NO: 1145 - RNA, 19 nt, Artificial Sequence
  Description of Artificial Sequence: Synthetic oligonucleotide
ucuggaugguacucggcac

SEQ ID NO: 1146 - RNA, 19 nt, Artificial Sequence
  Description of Artificial Sequence: Synthetic oligonucleotide
cuggaugguacucggcaca

SEQ ID NO: 1147 - RNA, 19 nt, Artificial Sequence
  Description of Artificial Sequence: Synthetic oligonucleotide
uggaugguacucggcacag

SEQ ID NO: 1148 - RNA, 19 nt, Artificial Sequence
  Description of Artificial Sequence: Synthetic oligonucleotide
ggaugguacucggcacaga

SEQ ID NO: 1149 - RNA, 19 nt, Artificial Sequence
  Description of Artificial Sequence: Synthetic oligonucleotide
gaugguacucggcacagag

SEQ ID NO: 1150 - RNA, 19 nt, Artificial Sequence
  Description of Artificial Sequence: Synthetic oligonucleotide
augguacucggcacagaga

SEQ ID NO: 1151 - RNA, 19 nt, Artificial Sequence
  Description of Artificial Sequence: Synthetic oligonucleotide
ugguacucggcacagagau

SEQ ID NO: 1152 - RNA, 19 nt, Artificial Sequence
  Description of Artificial Sequence: Synthetic oligonucleotide
gguacucggcacagagauc

SEQ ID NO: 1153 - RNA, 19 nt, Artificial Sequence
  Description of Artificial Sequence: Synthetic oligonucleotide
guacucggcacagagaucg

SEQ ID NO: 1154 - RNA, 19 nt, Artificial Sequence
  Description of Artificial Sequence: Synthetic oligonucleotide
uacucggcacagagaucga

SEQ ID NO: 1155 - RNA, 19 nt, Artificial Sequence
  Description of Artificial Sequence: Synthetic oligonucleotide
acucggcacagagaucgaa

SEQ ID NO: 1156 - RNA, 19 nt, Artificial Sequence
  Description of Artificial Sequence: Synthetic oligonucleotide
cucggcacagagaucgaaa

SEQ ID NO: 1157 - RNA, 19 nt, Artificial Sequence
  Description of Artificial Sequence: Synthetic oligonucleotide
ucggcacagagaucgaaac

SEQ ID NO: 1158 - RNA, 19 nt, Artificial Sequence
  Description of Artificial Sequence: Synthetic oligonucleotide
cggcacagagaucgaaacc

SEQ ID NO: 1159 - RNA, 19 nt, Artificial Sequence
  Description of Artificial Sequence: Synthetic oligonucleotide
ggcacagagaucgaaacca

SEQ ID NO: 1160 - RNA, 19 nt, Artificial Sequence
  Description of Artificial Sequence: Synthetic oligonucleotide
gcacagagaucgaaaccac

SEQ ID NO: 1161 - RNA, 19 nt, Artificial Sequence
  Description of Artificial Sequence: Synthetic oligonucleotide
cacagagaucgaaaccacg

SEQ ID NO: 1162 - RNA, 19 nt, Artificial Sequence
  Description of Artificial Sequence: Synthetic oligonucleotide
acagagaucgaaaccacgg

SEQ ID NO: 1163 - RNA, 19 nt, Artificial Sequence
  Description of Artificial Sequence: Synthetic oligonucleotide
cagagaucgaaaccacggu

SEQ ID NO: 1164 - RNA, 19 nt, Artificial Sequence
  Description of Artificial Sequence: Synthetic oligonucleotide
agagaucgaaaccacgguc

SEQ ID NO: 1165 - RNA, 19 nt, Artificial Sequence
  Description of Artificial Sequence: Synthetic oligonucleotide
gagaucgaaaccacgguca

SEQ ID NO: 1166 - RNA, 19 nt, Artificial Sequence
  Description of Artificial Sequence: Synthetic oligonucleotide
agaucgaaaccacggucau

SEQ ID NO: 1167 - RNA, 19 nt, Artificial Sequence
  Description of Artificial Sequence: Synthetic oligonucleotide
gaucgaaaccacggucauu

SEQ ID NO: 1168 - RNA, 19 nt, Artificial Sequence
  Description of Artificial Sequence: Synthetic oligonucleotide
aucgaaaccacggucauua

SEQ ID NO: 1169 - RNA, 19 nt, Artificial Sequence
  Description of Artificial Sequence: Synthetic oligonucleotide
ucgaaaccacggucauuac

SEQ ID NO: 1170 - RNA, 19 nt, Artificial Sequence
  Description of Artificial Sequence: Synthetic oligonucleotide
cgaaaccacggucauuacu

SEQ ID NO: 1171 - RNA, 19 nt, Artificial Sequence
  Description of Artificial Sequence: Synthetic oligonucleotide
gaaaccacggucauuacuc

SEQ ID NO: 1172 - RNA, 19 nt, Artificial Sequence
  Description of Artificial Sequence: Synthetic oligonucleotide
aaaccacggucauuacuca

SEQ ID NO: 1173 - RNA, 19 nt, Artificial Sequence
  Description of Artificial Sequence: Synthetic oligonucleotide
aaccacggucauuacucaa

SEQ ID NO: 1174 - RNA, 19 nt, Artificial Sequence
  Description of Artificial Sequence: Synthetic oligonucleotide
accacggucauuacucaaa

SEQ ID NO: 1175 - RNA, 19 nt, Artificial Sequence
  Description of Artificial Sequence: Synthetic oligonucleotide
ccacggucauuacucaaac

SEQ ID NO: 1176 - RNA, 19 nt, Artificial Sequence
  Description of Artificial Sequence: Synthetic oligonucleotide
cacggucauuacucaaacc

SEQ ID NO: 1177 - RNA, 19 nt, Artificial Sequence
  Description of Artificial Sequence: Synthetic oligonucleotide
acggucauuacucaaacca

SEQ ID NO: 1178 - RNA, 19 nt, Artificial Sequence
  Description of Artificial Sequence: Synthetic oligonucleotide
cggucauuacucaaaccau

SEQ ID NO: 1179 - RNA, 19 nt, Artificial Sequence
  Description of Artificial Sequence: Synthetic oligonucleotide
ggucauuacucaaaccaug

SEQ ID NO: 1180 - RNA, 19 nt, Artificial Sequence
  Description of Artificial Sequence: Synthetic oligonucleotide
gucauuacucaaaccauga

SEQ ID NO: 1181 - RNA, 19 nt, Artificial Sequence
  Description of Artificial Sequence: Synthetic oligonucleotide
ucauuacucaaaccaugac

SEQ ID NO: 1182 - RNA, 19 nt, Artificial Sequence
  Description of Artificial Sequence: Synthetic oligonucleotide
cauuacucaaaccaugacu

SEQ ID NO: 1183 - RNA, 19 nt, Artificial Sequence
  Description of Artificial Sequence: Synthetic oligonucleotide
auuacucaaaccaugacuu

SEQ ID NO: 1184 - RNA, 19 nt, Artificial Sequence
  Description of Artificial Sequence: Synthetic oligonucleotide
uuacucaaaccaugacuug

SEQ ID NO: 1185 - RNA, 19 nt, Artificial Sequence
  Description of Artificial Sequence: Synthetic oligonucleotide
uacucaaaccaugacuugg

SEQ ID NO: 1186 - RNA, 19 nt, Artificial Sequence
  Description of Artificial Sequence: Synthetic oligonucleotide
acucaaaccaugacuuggg

SEQ ID NO: 1187 - RNA, 19 nt, Artificial Sequence
  Description of Artificial Sequence: Synthetic oligonucleotide
cucaaaccaugacuuggga

SEQ ID NO: 1188 - RNA, 19 nt, Artificial Sequence
  Description of Artificial Sequence: Synthetic oligonucleotide
ucaaaccaugacuugggau

SEQ ID NO: 1189 - RNA, 19 nt, Artificial Sequence
  Description of Artificial Sequence: Synthetic oligonucleotide
caaaccaugacuugggaug

SEQ ID NO: 1190 - RNA, 19 nt, Artificial Sequence
  Description of Artificial Sequence: Synthetic oligonucleotide
aaaccaugacuugggaugg

SEQ ID NO: 1191 - RNA, 19 nt, Artificial Sequence
  Description of Artificial Sequence: Synthetic oligonucleotide
aaccaugacuugggauggc

SEQ ID NO: 1192 - RNA, 19 nt, Artificial Sequence
  Description of Artificial Sequence: Synthetic oligonucleotide
accaugacuugggauggca

SEQ ID NO: 1193 - RNA, 19 nt, Artificial Sequence
  Description of Artificial Sequence: Synthetic oligonucleotide
ccaugacuugggauggcag

SEQ ID NO: 1194 - RNA, 19 nt, Artificial Sequence
  Description of Artificial Sequence: Synthetic oligonucleotide
caugacuugggauggcaga

SEQ ID NO: 1195 - RNA, 19 nt, Artificial Sequence
  Description of Artificial Sequence: Synthetic oligonucleotide
augacuugggauggcagaa

SEQ ID NO: 1196 - RNA, 19 nt, Artificial Sequence
  Description of Artificial Sequence: Synthetic oligonucleotide
ugacuugggauggcagaau

SEQ ID NO: 1197 - RNA, 19 nt, Artificial Sequence
  Description of Artificial Sequence: Synthetic oligonucleotide
gacuugggauggcagaauc

SEQ ID NO: 1198 - RNA, 19 nt, Artificial Sequence
  Description of Artificial Sequence: Synthetic oligonucleotide
acuugggauggcagaaucu

SEQ ID NO: 1199 - RNA, 19 nt, Artificial Sequence
  Description of Artificial Sequence: Synthetic oligonucleotide
cuugggauggcagaaucua

SEQ ID NO: 1200 - RNA, 19 nt, Artificial Sequence
  Description of Artificial Sequence: Synthetic oligonucleotide
uugggauggcagaaucuag

SEQ ID NO: 1201 - RNA, 19 nt, Artificial Sequence
  Description of Artificial Sequence: Synthetic oligonucleotide
ugggauggcagaaucuagg

SEQ ID NO: 1202 - RNA, 19 nt, Artificial Sequence
  Description of Artificial Sequence: Synthetic oligonucleotide
gggauggcagaaucuagga

SEQ ID NO: 1203 - RNA, 19 nt, Artificial Sequence
  Description of Artificial Sequence: Synthetic oligonucleotide
ggauggcagaaucuaggaa

SEQ ID NO: 1204 - RNA, 19 nt, Artificial Sequence
  Description of Artificial Sequence: Synthetic oligonucleotide
gauggcagaaucuaggaag

SEQ ID NO: 1205 - RNA, 19 nt, Artificial Sequence
  Description of Artificial Sequence: Synthetic oligonucleotide
auggcagaaucuaggaaga

SEQ ID NO: 1206 - RNA, 19 nt, Artificial Sequence
  Description of Artificial Sequence: Synthetic oligonucleotide
uggcagaaucuaggaagac

SEQ ID NO: 1207 - RNA, 19 nt, Artificial Sequence
  Description of Artificial Sequence: Synthetic oligonucleotide
ggcagaaucuaggaagacc

SEQ ID NO: 1208 - RNA, 19 nt, Artificial Sequence
  Description of Artificial Sequence: Synthetic oligonucleotide
gcagaaucuaggaagacca

SEQ ID NO: 1209 - RNA, 19 nt, Artificial Sequence
  Description of Artificial Sequence: Synthetic oligonucleotide
cagaaucuaggaagaccac

SEQ ID NO: 1210 - RNA, 19 nt, Artificial Sequence
  Description of Artificial Sequence: Synthetic oligonucleotide
agaaucuaggaagaccaca

SEQ ID NO: 1211 - RNA, 19 nt, Artificial Sequence
  Description of Artificial Sequence: Synthetic oligonucleotide
gaaucuaggaagaccacac

SEQ ID NO: 1212 - RNA, 19 nt, Artificial Sequence
  Description of Artificial Sequence: Synthetic oligonucleotide
aaucuaggaagaccacaca

SEQ ID NO: 1213 - RNA, 19 nt, Artificial Sequence
  Description of Artificial Sequence: Synthetic oligonucleotide
aucuaggaagaccacacac

SEQ ID NO: 1214 - RNA, 19 nt, Artificial Sequence
  Description of Artificial Sequence: Synthetic oligonucleotide
ucuaggaagaccacacacu

SEQ ID NO: 1215 - RNA, 19 nt, Artificial Sequence
  Description of Artificial Sequence: Synthetic oligonucleotide
cuaggaagaccacacacua

SEQ ID NO: 1216 - RNA, 19 nt, Artificial Sequence
  Description of Artificial Sequence: Synthetic oligonucleotide
uaggaagaccacacacuaa

SEQ ID NO: 1217 - RNA, 19 nt, Artificial Sequence
  Description of Artificial Sequence: Synthetic oligonucleotide
aggaagaccacacacuaag

SEQ ID NO: 1218 - RNA, 19 nt, Artificial Sequence
  Description of Artificial Sequence: Synthetic oligonucleotide
ggaagaccacacacuaaga

SEQ ID NO: 1219 - RNA, 19 nt, Artificial Sequence
  Description of Artificial Sequence: Synthetic oligonucleotide
gaagaccacacacuaagau

SEQ ID NO: 1220 - RNA, 19 nt, Artificial Sequence
  Description of Artificial Sequence: Synthetic oligonucleotide
aagaccacacacuaagaug

SEQ ID NO: 1221 - RNA, 19 nt, Artificial Sequence
  Description of Artificial Sequence: Synthetic oligonucleotide
agaccacacacuaagaugu

SEQ ID NO: 1222 - RNA, 19 nt, Artificial Sequence
  Description of Artificial Sequence: Synthetic oligonucleotide
gaccacacacuaagauguc

SEQ ID NO: 1223 - RNA, 19 nt, Artificial Sequence
  Description of Artificial Sequence: Synthetic oligonucleotide
accacacacuaagauguca

SEQ ID NO: 1224 - RNA, 19 nt, Artificial Sequence
  Description of Artificial Sequence: Synthetic oligonucleotide
ccacacacuaagaugucac

SEQ ID NO: 1225 - RNA, 19 nt, Artificial Sequence
  Description of Artificial Sequence: Synthetic oligonucleotide
cacacacuaagaugucaca

SEQ ID NO: 1226 - RNA, 19 nt, Artificial Sequence
  Description of Artificial Sequence: Synthetic oligonucleotide
acacacuaagaugucacau

SEQ ID NO: 1227 - RNA, 19 nt, Artificial Sequence
  Description of Artificial Sequence: Synthetic oligonucleotide
cacacuaagaugucacaua

SEQ ID NO: 1228 - RNA, 19 nt, Artificial Sequence
  Description of Artificial Sequence: Synthetic oligonucleotide
acacuaagaugucacauau

SEQ ID NO: 1229 - RNA, 19 nt, Artificial Sequence
  Description of Artificial Sequence: Synthetic oligonucleotide
cacuaagaugucacauaua

SEQ ID NO: 1230 - RNA, 19 nt, Artificial Sequence
  Description of Artificial Sequence: Synthetic oligonucleotide
acuaagaugucacauauaa

SEQ ID NO: 1231 - RNA, 19 nt, Artificial Sequence
  Description of Artificial Sequence: Synthetic oligonucleotide
cuaagaugucacauauaaa

SEQ ID NO: 1232 - RNA, 19 nt, Artificial Sequence
  Description of Artificial Sequence: Synthetic oligonucleotide
uaagaugucacauauaaaa

SEQ ID NO: 1233 - RNA, 19 nt, Artificial Sequence
  Description of Artificial Sequence: Synthetic oligonucleotide
aagaugucacauauaaaag

SEQ ID NO: 1234 - RNA, 19 nt, Artificial Sequence
  Description of Artificial Sequence: Synthetic oligonucleotide
agaugucacauauaaaagg

SEQ ID NO: 1235 - RNA, 19 nt, Artificial Sequence
  Description of Artificial Sequence: Synthetic oligonucleotide
gaugucacauauaaaaggg

SEQ ID NO: 1236 - RNA, 19 nt, Artificial Sequence
  Description of Artificial Sequence: Synthetic oligonucleotide
augucacauauaaaagggc

SEQ ID NO: 1237 - RNA, 19 nt, Artificial Sequence
  Description of Artificial Sequence: Synthetic oligonucleotide
ugucacauauaaaagggca

SEQ ID NO: 1238 - RNA, 19 nt, Artificial Sequence
  Description of Artificial Sequence: Synthetic oligonucleotide
gucacauauaaaagggcau

SEQ ID NO: 1239 - RNA, 19 nt, Artificial Sequence
  Description of Artificial Sequence: Synthetic oligonucleotide
ucacauauaaaagggcaug

SEQ ID NO: 1240 - RNA, 19 nt, Artificial Sequence
  Description of Artificial Sequence: Synthetic oligonucleotide
cacauauaaaagggcauga

SEQ ID NO: 1241 - RNA, 19 nt, Artificial Sequence
  Description of Artificial Sequence: Synthetic oligonucleotide
acauauaaaagggcaugaa

SEQ ID NO: 1242 - RNA, 19 nt, Artificial Sequence
  Description of Artificial Sequence: Synthetic oligonucleotide
cauauaaaagggcaugaag

SEQ ID NO: 1243 - RNA, 19 nt, Artificial Sequence
  Description of Artificial Sequence: Synthetic oligonucleotide
auauaaaagggcaugaagg

SEQ ID NO: 1244 - RNA, 19 nt, Artificial Sequence
  Description of Artificial Sequence: Synthetic oligonucleotide
uauaaaagggcaugaagga

SEQ ID NO: 1245 - RNA, 19 nt, Artificial Sequence
  Description of Artificial Sequence: Synthetic oligonucleotide
auaaaagggcaugaaggag

SEQ ID NO: 1246 - RNA, 19 nt, Artificial Sequence
  Description of Artificial Sequence: Synthetic oligonucleotide
uaaaagggcaugaaggaga

SEQ ID NO: 1247 - RNA, 19 nt, Artificial Sequence
  Description of Artificial Sequence: Synthetic oligonucleotide
aaaagggcaugaaggagac

SEQ ID NO: 1248 - RNA, 19 nt, Artificial Sequence
  Description of Artificial Sequence: Synthetic oligonucleotide
aaagggcaugaaggagacc

SEQ ID NO: 1249 - RNA, 19 nt, Artificial Sequence
  Description of Artificial Sequence: Synthetic oligonucleotide
aagggcaugaaggagaccc

SEQ ID NO: 1250 - RNA, 19 nt, Artificial Sequence
  Description of Artificial Sequence: Synthetic oligonucleotide
agggcaugaaggagacccc

SEQ ID NO: 1251 - RNA, 19 nt, Artificial Sequence
  Description of Artificial Sequence: Synthetic oligonucleotide
gggcaugaaggagaccccu

SEQ ID NO: 1252 - RNA, 19 nt, Artificial Sequence
  Description of Artificial Sequence: Synthetic oligonucleotide
ggcaugaaggagaccccug

SEQ ID NO: 1253 - RNA, 19 nt, Artificial Sequence
  Description of Artificial Sequence: Synthetic oligonucleotide
gcaugaaggagaccccugc

SEQ ID NO: 1254 - RNA, 19 nt, Artificial Sequence
  Description of Artificial Sequence: Synthetic oligonucleotide
caugaaggagaccccugcc

SEQ ID NO: 1255 - RNA, 19 nt, Artificial Sequence
  Description of Artificial Sequence: Synthetic oligonucleotide
augaaggagaccccugccu

SEQ ID NO: 1256 - RNA, 19 nt, Artificial Sequence
  Description of Artificial Sequence: Synthetic oligonucleotide
ugaaggagaccccugccua

SEQ ID NO: 1257 - RNA, 19 nt, Artificial Sequence
  Description of Artificial Sequence: Synthetic oligonucleotide
gaaggagaccccugccuac

SEQ ID NO: 1258 - RNA, 19 nt, Artificial Sequence
  Description of Artificial Sequence: Synthetic oligonucleotide
aaggagaccccugccuacg

SEQ ID NO: 1259 - RNA, 19 nt, Artificial Sequence
  Description of Artificial Sequence: Synthetic oligonucleotide
aggagaccccugccuacga

SEQ ID NO: 1260 - RNA, 19 nt, Artificial Sequence
  Description of Artificial Sequence: Synthetic oligonucleotide
ggagaccccugccuacgau

SEQ ID NO: 1261 - RNA, 19 nt, Artificial Sequence
  Description of Artificial Sequence: Synthetic oligonucleotide
gagaccccugccuacgauc

SEQ ID NO: 1262 - RNA, 19 nt, Artificial Sequence
  Description of Artificial Sequence: Synthetic oligonucleotide
agaccccugccuacgauca

SEQ ID NO: 1263 - RNA, 19 nt, Artificial Sequence
  Description of Artificial Sequence: Synthetic oligonucleotide
gaccccugccuacgaucau

SEQ ID NO: 1264 - RNA, 19 nt, Artificial Sequence
  Description of Artificial Sequence: Synthetic oligonucleotide
accccugccuacgaucauc

SEQ ID NO: 1265 - RNA, 19 nt, Artificial Sequence
  Description of Artificial Sequence: Synthetic oligonucleotide
ccccugccuacgaucauca

SEQ ID NO: 1266 - RNA, 19 nt, Artificial Sequence
  Description of Artificial Sequence: Synthetic oligonucleotide
cccugccuacgaucaucag

SEQ ID NO: 1267 - RNA, 19 nt, Artificial Sequence
  Description of Artificial Sequence: Synthetic oligonucleotide
ccugccuacgaucaucaga

SEQ ID NO: 1268 - RNA, 19 nt, Artificial Sequence
  Description of Artificial Sequence: Synthetic oligonucleotide
cugccuacgaucaucagac

SEQ ID NO: 1269 - RNA, 19 nt, Artificial Sequence
  Description of Artificial Sequence: Synthetic oligonucleotide
ugccuacgaucaucagacu

SEQ ID NO: 1270 - RNA, 19 nt, Artificial Sequence
  Description of Artificial Sequence: Synthetic oligonucleotide
gccuacgaucaucagacug

SEQ ID NO: 1271 - RNA, 19 nt, Artificial Sequence
  Description of Artificial Sequence: Synthetic oligonucleotide
ccuacgaucaucagacugc

SEQ ID NO: 1272 - RNA, 19 nt, Artificial Sequence
  Description of Artificial Sequence: Synthetic oligonucleotide
cuacgaucaucagacugca

SEQ ID NO: 1273 - RNA, 19 nt, Artificial Sequence
  Description of Artificial Sequence: Synthetic oligonucleotide
uacgaucaucagacugcau

SEQ ID NO: 1274 - RNA, 19 nt, Artificial Sequence
  Description of Artificial Sequence: Synthetic oligonucleotide
acgaucaucagacugcauu

SEQ ID NO: 1275 - RNA, 19 nt, Artificial Sequence
  Description of Artificial Sequence: Synthetic oligonucleotide
cgaucaucagacugcauug

SEQ ID NO: 1276 - RNA, 19 nt, Artificial Sequence
  Description of Artificial Sequence: Synthetic oligonucleotide
gaucaucagacugcauuga

SEQ ID NO: 1277 - RNA, 19 nt, Artificial Sequence
  Description of Artificial Sequence: Synthetic oligonucleotide
aucaucagacugcauugaa

SEQ ID NO: 1278 - RNA, 19 nt, Artificial Sequence
  Description of Artificial Sequence: Synthetic oligonucleotide
ucaucagacugcauugaag

SEQ ID NO: 1279 - RNA, 19 nt, Artificial Sequence
  Description of Artificial Sequence: Synthetic oligonucleotide
caucagacugcauugaagg

SEQ ID NO: 1280 - RNA, 19 nt, Artificial Sequence
  Description of Artificial Sequence: Synthetic oligonucleotide
aucagacugcauugaaggg

SEQ ID NO: 1281 - RNA, 19 nt, Artificial Sequence
  Description of Artificial Sequence: Synthetic oligonucleotide
ucagacugcauugaagggu

SEQ ID NO: 1282 - RNA, 19 nt, Artificial Sequence
  Description of Artificial Sequence: Synthetic oligonucleotide
cagacugcauugaaggguu

SEQ ID NO: 1283 - RNA, 19 nt, Artificial Sequence
  Description of Artificial Sequence: Synthetic oligonucleotide
agacugcauugaaggguuu

SEQ ID NO: 1284 - RNA, 19 nt, Artificial Sequence
  Description of Artificial Sequence: Synthetic oligonucleotide
gacugcauugaaggguuuu

SEQ ID NO: 1285 - RNA, 19 nt, Artificial Sequence
  Description of Artificial Sequence: Synthetic oligonucleotide
acugcauugaaggguuuug

SEQ ID NO: 1286 - RNA, 19 nt, Artificial Sequence
  Description of Artificial Sequence: Synthetic oligonucleotide
cugcauugaaggguuuugc

SEQ ID NO: 1287 - RNA, 19 nt, Artificial Sequence
  Description of Artificial Sequence: Synthetic oligonucleotide
ugcauugaaggguuuugcu

SEQ ID NO: 1288 - RNA, 19 nt, Artificial Sequence
  Description of Artificial Sequence: Synthetic oligonucleotide
gcauugaaggguuuugcug

SEQ ID NO: 1289 - RNA, 19 nt, Artificial Sequence
  Description of Artificial Sequence: Synthetic oligonucleotide
cauugaaggguuuugcugu

SEQ ID NO: 1290 - RNA, 19 nt, Artificial Sequence
  Description of Artificial Sequence: Synthetic oligonucleotide
auugaaggguuuugcugug

SEQ ID NO: 1291 - RNA, 19 nt, Artificial Sequence
  Description of Artificial Sequence: Synthetic oligonucleotide
uugaaggguuuugcugugc

SEQ ID NO: 1292 - RNA, 19 nt, Artificial Sequence
  Description of Artificial Sequence: Synthetic oligonucleotide
ugaaggguuuugcugugcu

SEQ ID NO: 1293 - RNA, 19 nt, Artificial Sequence
  Description of Artificial Sequence: Synthetic oligonucleotide
gaaggguuuugcugugcuc

SEQ ID NO: 1294 - RNA, 19 nt, Artificial Sequence
  Description of Artificial Sequence: Synthetic oligonucleotide
aaggguuuugcugugcucg

SEQ ID NO: 1295 - RNA, 19 nt, Artificial Sequence
  Description of Artificial Sequence: Synthetic oligonucleotide
aggguuuugcugugcucgu

SEQ ID NO: 1296 - RNA, 19 nt, Artificial Sequence
  Description of Artificial Sequence: Synthetic oligonucleotide
ggguuuugcugugcucguc

SEQ ID NO: 1297 - RNA, 19 nt, Artificial Sequence
  Description of Artificial Sequence: Synthetic oligonucleotide
gguuuugcugugcucguca

SEQ ID NO: 1298 - RNA, 19 nt, Artificial Sequence
  Description of Artificial Sequence: Synthetic oligonucleotide
guuuugcugugcucgucau

SEQ ID NO: 1299 - RNA, 19 nt, Artificial Sequence
  Description of Artificial Sequence: Synthetic oligonucleotide
uuuugcugugcucgucauu

SEQ ID NO: 1300 - RNA, 19 nt, Artificial Sequence
  Description of Artificial Sequence: Synthetic oligonucleotide
uuugcugugcucgucauuu

SEQ ID NO: 1301 - RNA, 19 nt, Artificial Sequence
  Description of Artificial Sequence: Synthetic oligonucleotide
uugcugugcucgucauuuc

SEQ ID NO: 1302 - RNA, 19 nt, Artificial Sequence
  Description of Artificial Sequence: Synthetic oligonucleotide
ugcugugcucgucauuucu

SEQ ID NO: 1303 - RNA, 19 nt, Artificial Sequence
  Description of Artificial Sequence: Synthetic oligonucleotide
gcugugcucgucauuucug

SEQ ID NO: 1304 - RNA, 19 nt, Artificial Sequence
  Description of Artificial Sequence: Synthetic oligonucleotide
cugugcucgucauuucugg

SEQ ID NO: 1305 - RNA, 19 nt, Artificial Sequence
  Description of Artificial Sequence: Synthetic oligonucleotide
ugugcucgucauuucugga

SEQ ID NO: 1306 - RNA, 19 nt, Artificial Sequence
  Description of Artificial Sequence: Synthetic oligonucleotide
gugcucgucauuucuggac

SEQ ID NO: 1307 - RNA, 19 nt, Artificial Sequence
  Description of Artificial Sequence: Synthetic oligonucleotide
ugcucgucauuucuggacc

SEQ ID NO: 1308 - RNA, 19 nt, Artificial Sequence
  Description of Artificial Sequence: Synthetic oligonucleotide
gcucgucauuucuggacca

SEQ ID NO: 1309 - RNA, 19 nt, Artificial Sequence
  Description of Artificial Sequence: Synthetic oligonucleotide
cucgucauuucuggaccaa

SEQ ID NO: 1310 - RNA, 19 nt, Artificial Sequence
  Description of Artificial Sequence: Synthetic oligonucleotide
ucgucauuucuggaccaaa

SEQ ID NO: 1311 - RNA, 19 nt, Artificial Sequence
  Description of Artificial Sequence: Synthetic oligonucleotide
cgucauuucuggaccaaaa

SEQ ID NO: 1312 - RNA, 19 nt, Artificial Sequence
  Description of Artificial Sequence: Synthetic oligonucleotide
gucauuucuggaccaaaau

SEQ ID NO: 1313 - RNA, 19 nt, Artificial Sequence
  Description of Artificial Sequence: Synthetic oligonucleotide
ucauuucuggaccaaaauc

SEQ ID NO: 1314 - RNA, 19 nt, Artificial Sequence
  Description of Artificial Sequence: Synthetic oligonucleotide
cauuucuggaccaaaaucu

SEQ ID NO: 1315 - RNA, 19 nt, Artificial Sequence
  Description of Artificial Sequence: Synthetic oligonucleotide
auuucuggaccaaaaucug

SEQ ID NO: 1316 - RNA, 19 nt, Artificial Sequence
  Description of Artificial Sequence: Synthetic oligonucleotide
uuucuggaccaaaaucugc

SEQ ID NO: 1317 - RNA, 19 nt, Artificial Sequence
  Description of Artificial Sequence: Synthetic oligonucleotide
uucuggaccaaaaucugca

SEQ ID NO: 1318 - RNA, 19 nt, Artificial Sequence
  Description of Artificial Sequence: Synthetic oligonucleotide
ucuggaccaaaaucugcaa

SEQ ID NO: 1319 - RNA, 19 nt, Artificial Sequence
  Description of Artificial Sequence: Synthetic oligonucleotide
cuggaccaaaaucugcaaa

SEQ ID NO: 1320 - RNA, 19 nt, Artificial Sequence
  Description of Artificial Sequence: Synthetic oligonucleotide
uggaccaaaaucugcaaac

SEQ ID NO: 1321 - RNA, 19 nt, Artificial Sequence
  Description of Artificial Sequence: Synthetic oligonucleotide
ggaccaaaaucugcaaacc

SEQ ID NO: 1322 - RNA, 19 nt, Artificial Sequence
  Description of Artificial Sequence: Synthetic oligonucleotide
gaccaaaaucugcaaacca

SEQ ID NO: 1323 - RNA, 19 nt, Artificial Sequence
  Description of Artificial Sequence: Synthetic oligonucleotide
accaaaaucugcaaaccag

SEQ ID NO: 1324 - RNA, 19 nt, Artificial Sequence
  Description of Artificial Sequence: Synthetic oligonucleotide
ccaaaaucugcaaaccagu

SEQ ID NO: 1325 - RNA, 19 nt, Artificial Sequence
  Description of Artificial Sequence: Synthetic oligonucleotide
caaaaucugcaaaccagug

SEQ ID NO: 1326 - RNA, 19 nt, Artificial Sequence
  Description of Artificial Sequence: Synthetic oligonucleotide
aaaaucugcaaaccagugc

SEQ ID NO: 1327 - RNA, 19 nt, Artificial Sequence
  Description of Artificial Sequence: Synthetic oligonucleotide
aaaucugcaaaccagugcu

SEQ ID NO: 1328 - RNA, 19 nt, Artificial Sequence
  Description of Artificial Sequence: Synthetic oligonucleotide
aaucugcaaaccagugcuc

SEQ ID NO: 1329 - RNA, 19 nt, Artificial Sequence
  Description of Artificial Sequence: Synthetic oligonucleotide
aucugcaaaccagugcucc

SEQ ID NO: 1330 - RNA, 19 nt, Artificial Sequence
  Description of Artificial Sequence: Synthetic oligonucleotide
ucugcaaaccagugcucca

SEQ ID NO: 1331 - RNA, 19 nt, Artificial Sequence
  Description of Artificial Sequence: Synthetic oligonucleotide
cugcaaaccagugcuccau

SEQ ID NO: 1332 - RNA, 19 nt, Artificial Sequence
  Description of Artificial Sequence: Synthetic oligonucleotide
ugcaaaccagugcuccauc

SEQ ID NO: 1333 - RNA, 19 nt, Artificial Sequence
  Description of Artificial Sequence: Synthetic oligonucleotide
gcaaaccagugcuccauca

SEQ ID NO: 1334 - RNA, 19 nt, Artificial Sequence
  Description of Artificial Sequence: Synthetic oligonucleotide
caaaccagugcuccaucag

SEQ ID NO: 1335 - RNA, 19 nt, Artificial Sequence
  Description of Artificial Sequence: Synthetic oligonucleotide
aaaccagugcuccaucagg

SEQ ID NO: 1336 - RNA, 19 nt, Artificial Sequence
  Description of Artificial Sequence: Synthetic oligonucleotide
aaccagugcuccaucaggg

SEQ ID NO: 1337 - RNA, 19 nt, Artificial Sequence
  Description of Artificial Sequence: Synthetic oligonucleotide
accagugcuccaucagggg

SEQ ID NO: 1338 - RNA, 19 nt, Artificial Sequence
  Description of Artificial Sequence: Synthetic oligonucleotide
ccagugcuccaucaggggg

SEQ ID NO: 1339 - RNA, 19 nt, Artificial Sequence
  Description of Artificial Sequence: Synthetic oligonucleotide
cagugcuccaucaggggga

SEQ ID NO: 1340 - RNA, 19 nt, Artificial Sequence
  Description of Artificial Sequence: Synthetic oligonucleotide
agugcuccaucagggggaa

SEQ ID NO: 1341 - RNA, 19 nt, Artificial Sequence
  Description of Artificial Sequence: Synthetic oligonucleotide
gugcuccaucagggggaag

SEQ ID NO: 1342 - RNA, 19 nt, Artificial Sequence
  Description of Artificial Sequence: Synthetic oligonucleotide
ugcuccaucagggggaagu

SEQ ID NO: 1343 - RNA, 19 nt, Artificial Sequence
  Description of Artificial Sequence: Synthetic oligonucleotide
gcuccaucagggggaaguc

SEQ ID NO: 1344 - RNA, 19 nt, Artificial Sequence
  Description of Artificial Sequence: Synthetic oligonucleotide
cuccaucagggggaagucu

SEQ ID NO: 1345 - RNA, 19 nt, Artificial Sequence
  Description of Artificial Sequence: Synthetic oligonucleotide
uccaucagggggaagucug

SEQ ID NO: 1346 - RNA, 19 nt, Artificial Sequence
  Description of Artificial Sequence: Synthetic oligonucleotide
ccaucagggggaagucugu

SEQ ID NO: 1347 - RNA, 19 nt, Artificial Sequence
  Description of Artificial Sequence: Synthetic oligonucleotide
caucagggggaagucugua

SEQ ID NO: 1348 - RNA, 19 nt, Artificial Sequence
  Description of Artificial Sequence: Synthetic oligonucleotide
aucagggggaagucuguac

SEQ ID NO: 1349 - RNA, 19 nt, Artificial Sequence
  Description of Artificial Sequence: Synthetic oligonucleotide
ucagggggaagucuguacc

SEQ ID NO: 1350 - RNA, 19 nt, Artificial Sequence
  Description of Artificial Sequence: Synthetic oligonucleotide
cagggggaagucuguacca

SEQ ID NO: 1351 - RNA, 19 nt, Artificial Sequence
  Description of Artificial Sequence: Synthetic oligonucleotide
agggggaagucuguaccaa

SEQ ID NO: 1352 - RNA, 19 nt, Artificial Sequence
  Description of Artificial Sequence: Synthetic oligonucleotide
gggggaagucuguaccaaa

SEQ ID NO: 1353 - RNA, 19 nt, Artificial Sequence
  Description of Artificial Sequence: Synthetic oligonucleotide
ggggaagucuguaccaaac

SEQ ID NO: 1354 - RNA, 19 nt, Artificial Sequence
  Description of Artificial Sequence: Synthetic oligonucleotide
gggaagucuguaccaaaca

SEQ ID NO: 1355 - RNA, 19 nt, Artificial Sequence
  Description of Artificial Sequence: Synthetic oligonucleotide
ggaagucuguaccaaacaa

SEQ ID NO: 1356 - RNA, 19 nt, Artificial Sequence
  Description of Artificial Sequence: Synthetic oligonucleotide
gaagucuguaccaaacaac

SEQ ID NO: 1357 - RNA, 19 nt, Artificial Sequence
  Description of Artificial Sequence: Synthetic oligonucleotide
aagucuguaccaaacaacg

SEQ ID NO: 1358 - RNA, 19 nt, Artificial Sequence
  Description of Artificial Sequence: Synthetic oligonucleotide
agucuguaccaaacaacgc

SEQ ID NO: 1359 - RNA, 19 nt, Artificial Sequence
  Description of Artificial Sequence: Synthetic oligonucleotide
gucuguaccaaacaacgca

SEQ ID NO: 1360 - RNA, 19 nt, Artificial Sequence
  Description of Artificial Sequence: Synthetic oligonucleotide
ucuguaccaaacaacgcaa

SEQ ID NO: 1361 - RNA, 19 nt, Artificial Sequence
  Description of Artificial Sequence: Synthetic oligonucleotide
cuguaccaaacaacgcaag

SEQ ID NO: 1362 - RNA, 19 nt, Artificial Sequence
  Description of Artificial Sequence: Synthetic oligonucleotide
uguaccaaacaacgcaaga

SEQ ID NO: 1363 - RNA, 19 nt, Artificial Sequence
  Description of Artificial Sequence: Synthetic oligonucleotide
guaccaaacaacgcaagaa

SEQ ID NO: 1364 - RNA, 19 nt, Artificial Sequence
  Description of Artificial Sequence: Synthetic oligonucleotide
uaccaaacaacgcaagaag

SEQ ID NO: 1365 - RNA, 19 nt, Artificial Sequence
  Description of Artificial Sequence: Synthetic oligonucleotide
accaaacaacgcaagaagg

SEQ ID NO: 1366 - RNA, 19 nt, Artificial Sequence
  Description of Artificial Sequence: Synthetic oligonucleotide
ccaaacaacgcaagaaggg

SEQ ID NO: 1367 - RNA, 19 nt, Artificial Sequence
  Description of Artificial Sequence: Synthetic oligonucleotide
caaacaacgcaagaagggu

SEQ ID NO: 1368 - RNA, 19 nt, Artificial Sequence
  Description of Artificial Sequence: Synthetic oligonucleotide
aaacaacgcaagaaggguu

SEQ ID NO: 1369 - RNA, 19 nt, Artificial Sequence
  Description of Artificial Sequence: Synthetic oligonucleotide
aacaacgcaagaaggguuc

SEQ ID NO: 1370 - RNA, 19 nt, Artificial Sequence
  Description of Artificial Sequence: Synthetic oligonucleotide
acaacgcaagaaggguucu

SEQ ID NO: 1371 - RNA, 19 nt, Artificial Sequence
  Description of Artificial Sequence: Synthetic oligonucleotide
caacgcaagaaggguucuc

SEQ ID NO: 1372 - RNA, 19 nt, Artificial Sequence
  Description of Artificial Sequence: Synthetic oligonucleotide
aacgcaagaaggguucuca

SEQ ID NO: 1373 - RNA, 19 nt, Artificial Sequence
  Description of Artificial Sequence: Synthetic oligonucleotide
acgcaagaaggguucucau

SEQ ID NO: 1374 - RNA, 19 nt, Artificial Sequence
  Description of Artificial Sequence: Synthetic oligonucleotide
cgcaagaaggguucucaug

SEQ ID NO: 1375 - RNA, 19 nt, Artificial Sequence
  Description of Artificial Sequence: Synthetic oligonucleotide
gcaagaaggguucucaugg

SEQ ID NO: 1376 - RNA, 19 nt, Artificial Sequence
  Description of Artificial Sequence: Synthetic oligonucleotide
caagaaggguucucauggg

SEQ ID NO: 1377 - RNA, 19 nt, Artificial Sequence
  Description of Artificial Sequence: Synthetic oligonucleotide
aagaaggguucucaugggc

SEQ ID NO: 1378 - RNA, 19 nt, Artificial Sequence
  Description of Artificial Sequence: Synthetic oligonucleotide
agaaggguucucaugggcu

SEQ ID NO: 1379 - RNA, 19 nt, Artificial Sequence
  Description of Artificial Sequence: Synthetic oligonucleotide
gaaggguucucaugggcug

SEQ ID NO: 1380 - RNA, 19 nt, Artificial Sequence
  Description of Artificial Sequence: Synthetic oligonucleotide
aaggguucucaugggcugg

SEQ ID NO: 1381 - RNA, 19 nt, Artificial Sequence
  Description of Artificial Sequence: Synthetic oligonucleotide
aggguucucaugggcugga

SEQ ID NO: 1382 - RNA, 19 nt, Artificial Sequence
  Description of Artificial Sequence: Synthetic oligonucleotide
ggguucucaugggcuggaa

SEQ ID NO: 1383 - RNA, 19 nt, Artificial Sequence
  Description of Artificial Sequence: Synthetic oligonucleotide
gguucucaugggcuggaaa

SEQ ID NO: 1384 - RNA, 19 nt, Artificial Sequence
  Description of Artificial Sequence: Synthetic oligonucleotide
guucucaugggcuggaaau

SEQ ID NO: 1385 - RNA, 19 nt, Artificial Sequence
  Description of Artificial Sequence: Synthetic oligonucleotide
uucucaugggcuggaaauu

SEQ ID NO: 1386 - RNA, 19 nt, Artificial Sequence
  Description of Artificial Sequence: Synthetic oligonucleotide
ucucaugggcuggaaauuu

SEQ ID NO: 1387 - RNA, 19 nt, Artificial Sequence
  Description of Artificial Sequence: Synthetic oligonucleotide
cucaugggcuggaaauuuu

SEQ ID NO: 1388 - RNA, 19 nt, Artificial Sequence
  Description of Artificial Sequence: Synthetic oligonucleotide
ucaugggcuggaaauuuuc

SEQ ID NO: 1389 - RNA, 19 nt, Artificial Sequence
  Description of Artificial Sequence: Synthetic oligonucleotide
caugggcuggaaauuuucc

SEQ ID NO: 1390 - RNA, 19 nt, Artificial Sequence
  Description of Artificial Sequence: Synthetic oligonucleotide
augggcuggaaauuuucca

SEQ ID NO: 1391 - RNA, 19 nt, Artificial Sequence
  Description of Artificial Sequence: Synthetic oligonucleotide
ugggcuggaaauuuuccag

SEQ ID NO: 1392 - RNA, 19 nt, Artificial Sequence
  Description of Artificial Sequence: Synthetic oligonucleotide
gggcuggaaauuuuccagc

SEQ ID NO: 1393 - RNA, 19 nt, Artificial Sequence
  Description of Artificial Sequence: Synthetic oligonucleotide
ggcuggaaauuuuccagcg

SEQ ID NO: 1394 - RNA, 19 nt, Artificial Sequence
  Description of Artificial Sequence: Synthetic oligonucleotide
gcuggaaauuuuccagcgu

SEQ ID NO: 1395 - RNA, 19 nt, Artificial Sequence
  Description of Artificial Sequence: Synthetic oligonucleotide
cuggaaauuuuccagcguu

SEQ ID NO: 1396 - RNA, 19 nt, Artificial Sequence
  Description of Artificial Sequence: Synthetic oligonucleotide
uggaaauuuuccagcguug

SEQ ID NO: 1397 - RNA, 19 nt, Artificial Sequence
  Description of Artificial Sequence: Synthetic oligonucleotide
ggaaauuuuccagcguugc

SEQ ID NO: 1398 - RNA, 19 nt, Artificial Sequence
  Description of Artificial Sequence: Synthetic oligonucleotide
gaaauuuuccagcguugcg

SEQ ID NO: 1399 - RNA, 19 nt, Artificial Sequence
  Description of Artificial Sequence: Synthetic oligonucleotide
aaauuuuccagcguugcga

SEQ ID NO: 1400 - RNA, 19 nt, Artificial Sequence
  Description of Artificial Sequence: Synthetic oligonucleotide
aauuuuccagcguugcgac

SEQ ID NO: 1401 - RNA, 19 nt, Artificial Sequence
  Description of Artificial Sequence: Synthetic oligonucleotide
auuuuccagcguugcgacu

SEQ ID NO: 1402 - RNA, 19 nt, Artificial Sequence
  Description of Artificial Sequence: Synthetic oligonucleotide
uuuuccagcguugcgacug

SEQ ID NO: 1403 - RNA, 19 nt, Artificial Sequence
  Description of Artificial Sequence: Synthetic oligonucleotide
uuuccagcguugcgacugu

SEQ ID NO: 1404 - RNA, 19 nt, Artificial Sequence
  Description of Artificial Sequence: Synthetic oligonucleotide
uuccagcguugcgacugug

SEQ ID NO: 1405 - RNA, 19 nt, Artificial Sequence
  Description of Artificial Sequence: Synthetic oligonucleotide
uccagcguugcgacugugc

SEQ ID NO: 1406 - RNA, 19 nt, Artificial Sequence
  Description of Artificial Sequence: Synthetic oligonucleotide
ccagcguugcgacugugcg

SEQ ID NO: 1407 - RNA, 19 nt, Artificial Sequence
  Description of Artificial Sequence: Synthetic oligonucleotide
cagcguugcgacugugcga

SEQ ID NO: 1408 - RNA, 19 nt, Artificial Sequence
  Description of Artificial Sequence: Synthetic oligonucleotide
agcguugcgacugugcgaa

SEQ ID NO: 1409 - RNA, 19 nt, Artificial Sequence
  Description of Artificial Sequence: Synthetic oligonucleotide
gcguugcgacugugcgaag

SEQ ID NO: 1410 - RNA, 19 nt, Artificial Sequence
  Description of Artificial Sequence: Synthetic oligonucleotide
cguugcgacugugcgaagg

SEQ ID NO: 1411 - RNA, 19 nt, Artificial Sequence
  Description of Artificial Sequence: Synthetic oligonucleotide
guugcgacugugcgaaggg

SEQ ID NO: 1412 - RNA, 19 nt, Artificial Sequence
  Description of Artificial Sequence: Synthetic oligonucleotide
uugcgacugugcgaagggc

SEQ ID NO: 1413 - RNA, 19 nt, Artificial Sequence
  Description of Artificial Sequence: Synthetic oligonucleotide
ugcgacugugcgaagggcc

SEQ ID NO: 1414 - RNA, 19 nt, Artificial Sequence
  Description of Artificial Sequence: Synthetic oligonucleotide
gcgacugugcgaagggccu

SEQ ID NO: 1415 - RNA, 19 nt, Artificial Sequence
  Description of Artificial Sequence: Synthetic oligonucleotide
cgacugugcgaagggccug

SEQ ID NO: 1416 - RNA, 19 nt, Artificial Sequence
  Description of Artificial Sequence: Synthetic oligonucleotide
gacugugcgaagggccugu

SEQ ID NO: 1417 - RNA, 19 nt, Artificial Sequence
  Description of Artificial Sequence: Synthetic oligonucleotide
acugugcgaagggccuguc

SEQ ID NO: 1418 - RNA, 19 nt, Artificial Sequence
  Description of Artificial Sequence: Synthetic oligonucleotide
cugugcgaagggccugucu

SEQ ID NO: 1419 - RNA, 19 nt, Artificial Sequence
  Description of Artificial Sequence: Synthetic oligonucleotide
ugugcgaagggccugucuu

SEQ ID NO: 1420 - RNA, 19 nt, Artificial Sequence
  Description of Artificial Sequence: Synthetic oligonucleotide
gugcgaagggccugucuug

SEQ ID NO: 1421 - RNA, 19 nt, Artificial Sequence
  Description of Artificial Sequence: Synthetic oligonucleotide
ugcgaagggccugucuugc

SEQ ID NO: 1422 - RNA, 19 nt, Artificial Sequence
  Description of Artificial Sequence: Synthetic oligonucleotide
gcgaagggccugucuugca

SEQ ID NO: 1423 - RNA, 19 nt, Artificial Sequence
  Description of Artificial Sequence: Synthetic oligonucleotide
cgaagggccugucuugcaa

SEQ ID NO: 1424 - RNA, 19 nt, Artificial Sequence
  Description of Artificial Sequence: Synthetic oligonucleotide
gaagggccugucuugcaaa

SEQ ID NO: 1425 - RNA, 19 nt, Artificial Sequence
  Description of Artificial Sequence: Synthetic oligonucleotide
aagggccugucuugcaaag

SEQ ID NO: 1426 - RNA, 19 nt, Artificial Sequence
  Description of Artificial Sequence: Synthetic oligonucleotide
agggccugucuugcaaagu

SEQ ID NO: 1427 - RNA, 19 nt, Artificial Sequence
  Description of Artificial Sequence: Synthetic oligonucleotide
gggccugucuugcaaagua

SEQ ID NO: 1428 - RNA, 19 nt, Artificial Sequence
  Description of Artificial Sequence: Synthetic oligonucleotide
ggccugucuugcaaaguau

SEQ ID NO: 1429 - RNA, 19 nt, Artificial Sequence
  Description of Artificial Sequence: Synthetic oligonucleotide
gccugucuugcaaaguaug

SEQ ID NO: 1430 - RNA, 19 nt, Artificial Sequence
  Description of Artificial Sequence: Synthetic oligonucleotide
ccugucuugcaaaguaugg

SEQ ID NO: 1431 - RNA, 19 nt, Artificial Sequence
  Description of Artificial Sequence: Synthetic oligonucleotide
cugucuugcaaaguaugga

SEQ ID NO: 1432 - RNA, 19 nt, Artificial Sequence
  Description of Artificial Sequence: Synthetic oligonucleotide
ugucuugcaaaguauggaa

SEQ ID NO: 1433 - RNA, 19 nt, Artificial Sequence
  Description of Artificial Sequence: Synthetic oligonucleotide
gucuugcaaaguauggaaa

SEQ ID NO: 1434 - RNA, 19 nt, Artificial Sequence
  Description of Artificial Sequence: Synthetic oligonucleotide
ucuugcaaaguauggaaag

SEQ ID NO: 1435 - RNA, 19 nt, Artificial Sequence
  Description of Artificial Sequence: Synthetic oligonucleotide
cuugcaaaguauggaaaga

SEQ ID NO: 1436 - RNA, 19 nt, Artificial Sequence
  Description of Artificial Sequence: Synthetic oligonucleotide
uugcaaaguauggaaagau

SEQ ID NO: 1437 - RNA, 19 nt, Artificial Sequence
  Description of Artificial Sequence: Synthetic oligonucleotide
ugcaaaguauggaaagaug

SEQ ID NO: 1438 - RNA, 19 nt, Artificial Sequence
  Description of Artificial Sequence: Synthetic oligonucleotide
gcaaaguauggaaagaugc

SEQ ID NO: 1439 - RNA, 19 nt, Artificial Sequence
  Description of Artificial Sequence: Synthetic oligonucleotide
caaaguauggaaagaugcc

SEQ ID NO: 1440 - RNA, 19 nt, Artificial Sequence
  Description of Artificial Sequence: Synthetic oligonucleotide
aaaguauggaaagaugcca

SEQ ID NO: 1441 - RNA, 19 nt, Artificial Sequence
  Description of Artificial Sequence: Synthetic oligonucleotide
aaguauggaaagaugccac

SEQ ID NO: 1442 - RNA, 19 nt, Artificial Sequence
  Description of Artificial Sequence: Synthetic oligonucleotide
aguauggaaagaugccacc

SEQ ID NO: 1443 - RNA, 19 nt, Artificial Sequence
  Description of Artificial Sequence: Synthetic oligonucleotide
guauggaaagaugccaccu

SEQ ID NO: 1444 - RNA, 19 nt, Artificial Sequence
  Description of Artificial Sequence: Synthetic oligonucleotide
uauggaaagaugccaccua

SEQ ID NO: 1445 - RNA, 19 nt, Artificial Sequence
  Description of Artificial Sequence: Synthetic oligonucleotide
auggaaagaugccaccuac

SEQ ID NO: 1446 - RNA, 19 nt, Artificial Sequence
  Description of Artificial Sequence: Synthetic oligonucleotide
uggaaagaugccaccuacu

SEQ ID NO: 1447 - RNA, 19 nt, Artificial Sequence
  Description of Artificial Sequence: Synthetic oligonucleotide
ggaaagaugccaccuacuc

SEQ ID NO: 1448 - RNA, 19 nt, Artificial Sequence
  Description of Artificial Sequence: Synthetic oligonucleotide
gaaagaugccaccuacucc

SEQ ID NO: 1449 - RNA, 19 nt, Artificial Sequence
  Description of Artificial Sequence: Synthetic oligonucleotide
aaagaugccaccuacuccu

SEQ ID NO: 1450 - RNA, 19 nt, Artificial Sequence
  Description of Artificial Sequence: Synthetic oligonucleotide
aagaugccaccuacuccuc

SEQ ID NO: 1451 - RNA, 19 nt, Artificial Sequence
  Description of Artificial Sequence: Synthetic oligonucleotide
agaugccaccuacuccucc

SEQ ID NO: 1452 - RNA, 19 nt, Artificial Sequence
  Description of Artificial Sequence: Synthetic oligonucleotide
gaugccaccuacuccucca

SEQ ID NO: 1453 - RNA, 19 nt, Artificial Sequence
  Description of Artificial Sequence: Synthetic oligonucleotide
augccaccuacuccuccaa

SEQ ID NO: 1454 - RNA, 19 nt, Artificial Sequence
  Description of Artificial Sequence: Synthetic oligonucleotide
ugccaccuacuccuccaaa

SEQ ID NO: 1455 - RNA, 19 nt, Artificial Sequence
  Description of Artificial Sequence: Synthetic oligonucleotide
gccaccuacuccuccaaag

SEQ ID NO: 1456 - RNA, 19 nt, Artificial Sequence
  Description of Artificial Sequence: Synthetic oligonucleotide
ccaccuacuccuccaaagc

SEQ ID NO: 1457 - RNA, 19 nt, Artificial Sequence
  Description of Artificial Sequence: Synthetic oligonucleotide
caccuacuccuccaaagcc

SEQ ID NO: 1458 - RNA, 19 nt, Artificial Sequence
  Description of Artificial Sequence: Synthetic oligonucleotide
accuacuccuccaaagcca

SEQ ID NO: 1459 - RNA, 19 nt, Artificial Sequence
  Description of Artificial Sequence: Synthetic oligonucleotide
ccuacuccuccaaagccag

SEQ ID NO: 1460 - RNA, 19 nt, Artificial Sequence
  Description of Artificial Sequence: Synthetic oligonucleotide
cuacuccuccaaagccaga

SEQ ID NO: 1461 - RNA, 19 nt, Artificial Sequence
  Description of Artificial Sequence: Synthetic oligonucleotide
uacuccuccaaagccagac

SEQ ID NO: 1462 - RNA, 19 nt, Artificial Sequence
  Description of Artificial Sequence: Synthetic oligonucleotide
acuccuccaaagccagacu

SEQ ID NO: 1463 - RNA, 19 nt, Artificial Sequence
  Description of Artificial Sequence: Synthetic oligonucleotide
cuccuccaaagccagacuc

SEQ ID NO: 1464 - RNA, 19 nt, Artificial Sequence
  Description of Artificial Sequence: Synthetic oligonucleotide
uccuccaaagccagacucc

SEQ ID NO: 1465 - RNA, 19 nt, Artificial Sequence
  Description of Artificial Sequence: Synthetic oligonucleotide
ccuccaaagccagacucca

SEQ ID NO: 1466 - RNA, 19 nt, Artificial Sequence
  Description of Artificial Sequence: Synthetic oligonucleotide
cuccaaagccagacuccau

SEQ ID NO: 1467 - RNA, 19 nt, Artificial Sequence
  Description of Artificial Sequence: Synthetic oligonucleotide
uccaaagccagacuccaug

SEQ ID NO: 1468 - RNA, 19 nt, Artificial Sequence
  Description of Artificial Sequence: Synthetic oligonucleotide
ccaaagccagacuccaugu

SEQ ID NO: 1469 - RNA, 19 nt, Artificial Sequence
  Description of Artificial Sequence: Synthetic oligonucleotide
caaagccagacuccaugug

SEQ ID NO: 1470 - RNA, 19 nt, Artificial Sequence
  Description of Artificial Sequence: Synthetic oligonucleotide
aaagccagacuccaugugu

SEQ ID NO: 1471 - RNA, 19 nt, Artificial Sequence
  Description of Artificial Sequence: Synthetic oligonucleotide
aagccagacuccaugugug

SEQ ID NO: 1472 - RNA, 19 nt, Artificial Sequence
  Description of Artificial Sequence: Synthetic oligonucleotide
agccagacuccaugugugu

SEQ ID NO: 1473 - RNA, 19 nt, Artificial Sequence
  Description of Artificial Sequence: Synthetic oligonucleotide
gccagacuccauguguguc

SEQ ID NO: 1474 - RNA, 19 nt, Artificial Sequence
  Description of Artificial Sequence: Synthetic oligonucleotide
ccagacuccauguguguca

SEQ ID NO: 1475 - RNA, 19 nt, Artificial Sequence
  Description of Artificial Sequence: Synthetic oligonucleotide
cagacuccaugugugucag

SEQ ID NO: 1476 - RNA, 19 nt, Artificial Sequence
  Description of Artificial Sequence: Synthetic oligonucleotide
agacuccaugugugucaga

SEQ ID NO: 1477 - RNA, 19 nt, Artificial Sequence
  Description of Artificial Sequence: Synthetic oligonucleotide
gacuccaugugugucagaa

SEQ ID NO: 1478 - RNA, 19 nt, Artificial Sequence
  Description of Artificial Sequence: Synthetic oligonucleotide
acuccaugugugucagaaa

SEQ ID NO: 1479 - RNA, 19 nt, Artificial Sequence
  Description of Artificial Sequence: Synthetic oligonucleotide
cuccaugugugucagaaaa

SEQ ID NO: 1480 - RNA, 19 nt, Artificial Sequence
  Description of Artificial Sequence: Synthetic oligonucleotide
uccaugugugucagaaaau

SEQ ID NO: 1481 - RNA, 19 nt, Artificial Sequence
  Description of Artificial Sequence: Synthetic oligonucleotide
ccaugugugucagaaaauu

SEQ ID NO: 1482 - RNA, 19 nt, Artificial Sequence
  Description of Artificial Sequence: Synthetic oligonucleotide
caugugugucagaaaauuu

SEQ ID NO: 1483 - RNA, 19 nt, Artificial Sequence
  Description of Artificial Sequence: Synthetic oligonucleotide
augugugucagaaaauuug

SEQ ID NO: 1484 - RNA, 19 nt, Artificial Sequence
  Description of Artificial Sequence: Synthetic oligonucleotide
ugugugucagaaaauuuga

SEQ ID NO: 1485 - RNA, 19 nt, Artificial Sequence
  Description of Artificial Sequence: Synthetic oligonucleotide
gugugucagaaaauuugau

SEQ ID NO: 1486 - RNA, 19 nt, Artificial Sequence
  Description of Artificial Sequence: Synthetic oligonucleotide
ugugucagaaaauuugauc

SEQ ID NO: 1487 - RNA, 19 nt, Artificial Sequence
  Description of Artificial Sequence: Synthetic oligonucleotide
gugucagaaaauuugauca

SEQ ID NO: 1488 - RNA, 19 nt, Artificial Sequence
  Description of Artificial Sequence: Synthetic oligonucleotide
ugucagaaaauuugaucac

SEQ ID NO: 1489 - RNA, 19 nt, Artificial Sequence
  Description of Artificial Sequence: Synthetic oligonucleotide
gucagaaaauuugaucacc

SEQ ID NO: 1490 - RNA, 19 nt, Artificial Sequence
  Description of Artificial Sequence: Synthetic oligonucleotide
ucagaaaauuugaucacca

SEQ ID NO: 1491 - RNA, 19 nt, Artificial Sequence
  Description of Artificial Sequence: Synthetic oligonucleotide
cagaaaauuugaucaccau

SEQ ID NO: 1492 - RNA, 19 nt, Artificial Sequence
  Description of Artificial Sequence: Synthetic oligonucleotide
agaaaauuugaucaccauu

SEQ ID NO: 1493 - RNA, 19 nt, Artificial Sequence
  Description of Artificial Sequence: Synthetic oligonucleotide
gaaaauuugaucaccauug

SEQ ID NO: 1494 - RNA, 19 nt, Artificial Sequence
  Description of Artificial Sequence: Synthetic oligonucleotide
aaaauuugaucaccauuga

SEQ ID NO: 1495 - RNA, 19 nt, Artificial Sequence
  Description of Artificial Sequence: Synthetic oligonucleotide
aaauuugaucaccauugag

SEQ ID NO: 1496 - RNA, 19 nt, Artificial Sequence
  Description of Artificial Sequence: Synthetic oligonucleotide
aauuugaucaccauugagg

SEQ ID NO: 1497 - RNA, 19 nt, Artificial Sequence
  Description of Artificial Sequence: Synthetic oligonucleotide
auuugaucaccauugagga

SEQ ID NO: 1498 - RNA, 19 nt, Artificial Sequence
  Description of Artificial Sequence: Synthetic oligonucleotide
uuugaucaccauugaggaa

SEQ ID NO: 1499 - RNA, 19 nt, Artificial Sequence
  Description of Artificial Sequence: Synthetic oligonucleotide
uugaucaccauugaggaac

SEQ ID NO: 1500 - RNA, 19 nt, Artificial Sequence
  Description of Artificial Sequence: Synthetic oligonucleotide
ugaucaccauugaggaaca

SEQ ID NO: 1501 - RNA, 19 nt, Artificial Sequence
  Description of Artificial Sequence: Synthetic oligonucleotide
gaucaccauugaggaacau

SEQ ID NO: 1502 - RNA, 19 nt, Artificial Sequence
  Description of Artificial Sequence: Synthetic oligonucleotide
aucaccauugaggaacauc

SEQ ID NO: 1503 - RNA, 19 nt, Artificial Sequence
  Description of Artificial Sequence: Synthetic oligonucleotide
ucaccauugaggaacauca

SEQ ID NO: 1504 - RNA, 19 nt, Artificial Sequence
  Description of Artificial Sequence: Synthetic oligonucleotide
caccauugaggaacaucau

SEQ ID NO: 1505 - RNA, 19 nt, Artificial Sequence
  Description of Artificial Sequence: Synthetic oligonucleotide
accauugaggaacaucauc

SEQ ID NO: 1506 - RNA, 19 nt, Artificial Sequence
  Description of Artificial Sequence: Synthetic oligonucleotide
ccauugaggaacaucauca

SEQ ID NO: 1507 - RNA, 19 nt, Artificial Sequence
  Description of Artificial Sequence: Synthetic oligonucleotide
cauugaggaacaucaucaa

SEQ ID NO: 1508 - RNA, 19 nt, Artificial Sequence
  Description of Artificial Sequence: Synthetic oligonucleotide
auugaggaacaucaucaau

SEQ ID NO: 1509 - RNA, 19 nt, Artificial Sequence
  Description of Artificial Sequence: Synthetic oligonucleotide
uugaggaacaucaucaauu

SEQ ID NO: 1510 - RNA, 19 nt, Artificial Sequence
  Description of Artificial Sequence: Synthetic oligonucleotide
ugaggaacaucaucaauug

SEQ ID NO: 1511 - RNA, 19 nt, Artificial Sequence
  Description of Artificial Sequence: Synthetic oligonucleotide
gaggaacaucaucaauugc

SEQ ID NO: 1512 - RNA, 19 nt, Artificial Sequence
  Description of Artificial Sequence: Synthetic oligonucleotide
aggaacaucaucaauugca

SEQ ID NO: 1513 - RNA, 19 nt, Artificial Sequence
  Description of Artificial Sequence: Synthetic oligonucleotide
ggaacaucaucaauugcag

SEQ ID NO: 1514 - RNA, 19 nt, Artificial Sequence
  Description of Artificial Sequence: Synthetic oligonucleotide
gaacaucaucaauugcaga

SEQ ID NO: 1515 - RNA, 19 nt, Artificial Sequence
  Description of Artificial Sequence: Synthetic oligonucleotide
aacaucaucaauugcagac

SEQ ID NO: 1516 - RNA, 19 nt, Artificial Sequence
  Description of Artificial Sequence: Synthetic oligonucleotide
acaucaucaauugcagacu

SEQ ID NO: 1517 - RNA, 19 nt, Artificial Sequence
  Description of Artificial Sequence: Synthetic oligonucleotide
caucaucaauugcagacug

SEQ ID NO: 1518 - RNA, 19 nt, Artificial Sequence
  Description of Artificial Sequence: Synthetic oligonucleotide
aucaucaauugcagacugu

SEQ ID NO: 1519 - RNA, 19 nt, Artificial Sequence
  Description of Artificial Sequence: Synthetic oligonucleotide
ucaucaauugcagacugug

SEQ ID NO: 1520 - RNA, 19 nt, Artificial Sequence
  Description of Artificial Sequence: Synthetic oligonucleotide
caucaauugcagacuguga

SEQ ID NO: 1521 - RNA, 19 nt, Artificial Sequence
  Description of Artificial Sequence: Synthetic oligonucleotide
aucaauugcagacugugaa

SEQ ID NO: 1522 - RNA, 19 nt, Artificial Sequence
  Description of Artificial Sequence: Synthetic oligonucleotide
ucaauugcagacugugaag

SEQ ID NO: 1523 - RNA, 19 nt, Artificial Sequence
  Description of Artificial Sequence: Synthetic oligonucleotide
caauugcagacugugaagu

SEQ ID NO: 1524 - RNA, 19 nt, Artificial Sequence
  Description of Artificial Sequence: Synthetic oligonucleotide
aauugcagacugugaaguu

SEQ ID NO: 1525 - RNA, 19 nt, Artificial Sequence
  Description of Artificial Sequence: Synthetic oligonucleotide
auugcagacugugaaguug

SEQ ID NO: 1526 - RNA, 19 nt, Artificial Sequence
  Description of Artificial Sequence: Synthetic oligonucleotide
uugcagacugugaaguugu

SEQ ID NO: 1527 - RNA, 19 nt, Artificial Sequence
  Description of Artificial Sequence: Synthetic oligonucleotide
ugcagacugugaaguugug

SEQ ID NO: 1528 - RNA, 19 nt, Artificial Sequence
  Description of Artificial Sequence: Synthetic oligonucleotide
gcagacugugaaguugugu

SEQ ID NO: 1529 - RNA, 19 nt, Artificial Sequence
  Description of Artificial Sequence: Synthetic oligonucleotide
cagacugugaaguugugua

SEQ ID NO: 1530 - RNA, 19 nt, Artificial Sequence
  Description of Artificial Sequence: Synthetic oligonucleotide
agacugugaaguuguguau

SEQ ID NO: 1531 - RNA, 19 nt, Artificial Sequence
  Description of Artificial Sequence: Synthetic oligonucleotide
gacugugaaguuguguauu

SEQ ID NO: 1532 - RNA, 19 nt, Artificial Sequence
  Description of Artificial Sequence: Synthetic oligonucleotide
acugugaaguuguguauuu

SEQ ID NO: 1533 - RNA, 19 nt, Artificial Sequence
  Description of Artificial Sequence: Synthetic oligonucleotide
cugugaaguuguguauuua

SEQ ID NO: 1534 - RNA, 19 nt, Artificial Sequence
  Description of Artificial Sequence: Synthetic oligonucleotide
ugugaaguuguguauuuaa

SEQ ID NO: 1535 - RNA, 19 nt, Artificial Sequence
  Description of Artificial Sequence: Synthetic oligonucleotide
gugaaguuguguauuuaau

SEQ ID NO: 1536 - RNA, 19 nt, Artificial Sequence
  Description of Artificial Sequence: Synthetic oligonucleotide
ugaaguuguguauuuaaug

SEQ ID NO: 1537 - RNA, 19 nt, Artificial Sequence
  Description of Artificial Sequence: Synthetic oligonucleotide
gaaguuguguauuuaaugc

SEQ ID NO: 1538 - RNA, 19 nt, Artificial Sequence
  Description of Artificial Sequence: Synthetic oligonucleotide
aaguuguguauuuaaugca

SEQ ID NO: 1539 - RNA, 19 nt, Artificial Sequence
  Description of Artificial Sequence: Synthetic oligonucleotide
aguuguguauuuaaugcau

SEQ ID NO: 1540 - RNA, 19 nt, Artificial Sequence
  Description of Artificial Sequence: Synthetic oligonucleotide
guuguguauuuaaugcauu

SEQ ID NO: 1541 - RNA, 19 nt, Artificial Sequence
  Description of Artificial Sequence: Synthetic oligonucleotide
uuguguauuuaaugcauua

SEQ ID NO: 1542 - RNA, 19 nt, Artificial Sequence
  Description of Artificial Sequence: Synthetic oligonucleotide
uguguauuuaaugcauuau

SEQ ID NO: 1543 - RNA, 19 nt, Artificial Sequence
  Description of Artificial Sequence: Synthetic oligonucleotide
guguauuuaaugcauuaua

SEQ ID NO: 1544 - RNA, 19 nt, Artificial Sequence
  Description of Artificial Sequence: Synthetic oligonucleotide
uguauuuaaugcauuauag

SEQ ID NO: 1545 - RNA, 19 nt, Artificial Sequence
  Description of Artificial Sequence: Synthetic oligonucleotide
guauuuaaugcauuauagc

SEQ ID NO: 1546 - RNA, 19 nt, Artificial Sequence
  Description of Artificial Sequence: Synthetic oligonucleotide
uauuuaaugcauuauagca

SEQ ID NO: 1547 - RNA, 19 nt, Artificial Sequence
  Description of Artificial Sequence: Synthetic oligonucleotide
auuuaaugcauuauagcau

SEQ ID NO: 1548 - RNA, 19 nt, Artificial Sequence
  Description of Artificial Sequence: Synthetic oligonucleotide
uuuaaugcauuauagcaug

SEQ ID NO: 1549 - RNA, 19 nt, Artificial Sequence
  Description of Artificial Sequence: Synthetic oligonucleotide
uuaaugcauuauagcaugg

SEQ ID NO: 1550 - RNA, 19 nt, Artificial Sequence
  Description of Artificial Sequence: Synthetic oligonucleotide
uaaugcauuauagcauggu

SEQ ID NO: 1551 - RNA, 19 nt, Artificial Sequence
  Description of Artificial Sequence: Synthetic oligonucleotide
aaugcauuauagcauggug

SEQ ID NO: 1552 - RNA, 19 nt, Artificial Sequence
  Description of Artificial Sequence: Synthetic oligonucleotide
augcauuauagcauggugg

SEQ ID NO: 1553 - RNA, 19 nt, Artificial Sequence
  Description of Artificial Sequence: Synthetic oligonucleotide
ugcauuauagcauggugga

SEQ ID NO: 1554 - RNA, 19 nt, Artificial Sequence
  Description of Artificial Sequence: Synthetic oligonucleotide
gcauuauagcaugguggaa

SEQ ID NO: 1555 - RNA, 19 nt, Artificial Sequence
  Description of Artificial Sequence: Synthetic oligonucleotide
cauuauagcaugguggaaa

SEQ ID NO: 1556 - RNA, 19 nt, Artificial Sequence
  Description of Artificial Sequence: Synthetic oligonucleotide
auuauagcaugguggaaaa

SEQ ID NO: 1557 - RNA, 19 nt, Artificial Sequence
  Description of Artificial Sequence: Synthetic oligonucleotide
uuauagcaugguggaaaau

SEQ ID NO: 1558 - RNA, 19 nt, Artificial Sequence
  Description of Artificial Sequence: Synthetic oligonucleotide
uauagcaugguggaaaaua

SEQ ID NO: 1559 - RNA, 19 nt, Artificial Sequence
  Description of Artificial Sequence: Synthetic oligonucleotide
auagcaugguggaaaauaa

SEQ ID NO: 1560 - RNA, 19 nt, Artificial Sequence
  Description of Artificial Sequence: Synthetic oligonucleotide
uagcaugguggaaaauaag

SEQ ID NO: 1561 - RNA, 19 nt, Artificial Sequence
  Description of Artificial Sequence: Synthetic oligonucleotide
agcaugguggaaaauaagg

SEQ ID NO: 1562 - RNA, 19 nt, Artificial Sequence
  Description of Artificial Sequence: Synthetic oligonucleotide
gcaugguggaaaauaaggu

SEQ ID NO: 1563 - RNA, 19 nt, Artificial Sequence
  Description of Artificial Sequence: Synthetic oligonucleotide
caugguggaaaauaagguu

SEQ ID NO: 1564 - RNA, 19 nt, Artificial Sequence
  Description of Artificial Sequence: Synthetic oligonucleotide
augguggaaaauaagguuc

SEQ ID NO: 1565 - RNA, 19 nt, Artificial Sequence
  Description of Artificial Sequence: Synthetic oligonucleotide
ugguggaaaauaagguuca

SEQ ID NO: 1566 - RNA, 19 nt, Artificial Sequence
  Description of Artificial Sequence: Synthetic oligonucleotide
gguggaaaauaagguucag

SEQ ID NO: 1567 - RNA, 19 nt, Artificial Sequence
  Description of Artificial Sequence: Synthetic oligonucleotide
guggaaaauaagguucaga

SEQ ID NO: 1568 - RNA, 19 nt, Artificial Sequence
  Description of Artificial Sequence: Synthetic oligonucleotide
uggaaaauaagguucagau

SEQ ID NO: 1569 - RNA, 19 nt, Artificial Sequence
  Description of Artificial Sequence: Synthetic oligonucleotide
ggaaaauaagguucagaug

SEQ ID NO: 1570 - RNA, 19 nt, Artificial Sequence
  Description of Artificial Sequence: Synthetic oligonucleotide
gaaaauaagguucagaugc

SEQ ID NO: 1571 - RNA, 19 nt, Artificial Sequence
  Description of Artificial Sequence: Synthetic oligonucleotide
aaaauaagguucagaugca

SEQ ID NO: 1572 - RNA, 19 nt, Artificial Sequence
  Description of Artificial Sequence: Synthetic oligonucleotide
aaauaagguucagaugcag

SEQ ID NO: 1573 - RNA, 19 nt, Artificial Sequence
  Description of Artificial Sequence: Synthetic oligonucleotide
aauaagguucagaugcaga

SEQ ID NO: 1574 - RNA, 19 nt, Artificial Sequence
  Description of Artificial Sequence: Synthetic oligonucleotide
auaagguucagaugcagaa

SEQ ID NO: 1575 - RNA, 19 nt, Artificial Sequence
  Description of Artificial Sequence: Synthetic oligonucleotide
uaagguucagaugcagaag

SEQ ID NO: 1576 - RNA, 19 nt, Artificial Sequence
  Description of Artificial Sequence: Synthetic oligonucleotide
aagguucagaugcagaaga

SEQ ID NO: 1577 - RNA, 19 nt, Artificial Sequence
  Description of Artificial Sequence: Synthetic oligonucleotide
agguucagaugcagaagaa

SEQ ID NO: 1578 - RNA, 19 nt, Artificial Sequence
  Description of Artificial Sequence: Synthetic oligonucleotide
gguucagaugcagaagaau

SEQ ID NO: 1579 - RNA, 19 nt, Artificial Sequence
  Description of Artificial Sequence: Synthetic oligonucleotide
guucagaugcagaagaaug

SEQ ID NO: 1580 - RNA, 19 nt, Artificial Sequence
  Description of Artificial Sequence: Synthetic oligonucleotide
uucagaugcagaagaaugg

SEQ ID NO: 1581 - RNA, 19 nt, Artificial Sequence
  Description of Artificial Sequence: Synthetic oligonucleotide
ucagaugcagaagaauggc

SEQ ID NO: 1582 - RNA, 19 nt, Artificial Sequence
  Description of Artificial Sequence: Synthetic oligonucleotide
cagaugcagaagaauggcu

SEQ ID NO: 1583 - RNA, 19 nt, Artificial Sequence
  Description of Artificial Sequence: Synthetic oligonucleotide
agaugcagaagaauggcua

SEQ ID NO: 1584 - RNA, 19 nt, Artificial Sequence
  Description of Artificial Sequence: Synthetic oligonucleotide
gaugcagaagaauggcuaa

SEQ ID NO: 1585 - RNA, 19 nt, Artificial Sequence
  Description of Artificial Sequence: Synthetic oligonucleotide
augcagaagaauggcuaaa

SEQ ID NO: 1586 - RNA, 19 nt, Artificial Sequence
  Description of Artificial Sequence: Synthetic oligonucleotide
ugcagaagaauggcuaaaa

SEQ ID NO: 1587 - RNA, 19 nt, Artificial Sequence
  Description of Artificial Sequence: Synthetic oligonucleotide
gcagaagaauggcuaaaau

SEQ ID NO: 1588 - RNA, 19 nt, Artificial Sequence
  Description of Artificial Sequence: Synthetic oligonucleotide
cagaagaauggcuaaaaua

SEQ ID NO: 1589 - RNA, 19 nt, Artificial Sequence
  Description of Artificial Sequence: Synthetic oligonucleotide
agaagaauggcuaaaauaa

SEQ ID NO: 1590 - RNA, 19 nt, Artificial Sequence
  Description of Artificial Sequence: Synthetic oligonucleotide
gaagaauggcuaaaauaag

SEQ ID NO: 1591 - RNA, 19 nt, Artificial Sequence
  Description of Artificial Sequence: Synthetic oligonucleotide
aagaauggcuaaaauaaga

SEQ ID NO: 1592 - RNA, 19 nt, Artificial Sequence
  Description of Artificial Sequence: Synthetic oligonucleotide
agaauggcuaaaauaagaa

SEQ ID NO: 1593 - RNA, 19 nt, Artificial Sequence
  Description of Artificial Sequence: Synthetic oligonucleotide
gaauggcuaaaauaagaaa

SEQ ID NO: 1594 - RNA, 19 nt, Artificial Sequence
  Description of Artificial Sequence: Synthetic oligonucleotide
aauggcuaaaauaagaaac

SEQ ID NO: 1595 - RNA, 19 nt, Artificial Sequence
  Description of Artificial Sequence: Synthetic oligonucleotide
auggcuaaaauaagaaacg

SEQ ID NO: 1596 - RNA, 19 nt, Artificial Sequence
  Description of Artificial Sequence: Synthetic oligonucleotide
uggcuaaaauaagaaacgu

SEQ ID NO: 1597 - RNA, 19 nt, Artificial Sequence
  Description of Artificial Sequence: Synthetic oligonucleotide
ggcuaaaauaagaaacgug

SEQ ID NO: 1598 - RNA, 19 nt, Artificial Sequence
  Description of Artificial Sequence: Synthetic oligonucleotide
gcuaaaauaagaaacguga

SEQ ID NO: 1599 - RNA, 19 nt, Artificial Sequence
  Description of Artificial Sequence: Synthetic oligonucleotide
cuaaaauaagaaacgugau

SEQ ID NO: 1600 - RNA, 19 nt, Artificial Sequence
  Description of Artificial Sequence: Synthetic oligonucleotide
uaaaauaagaaacgugaua

SEQ ID NO: 1601 - RNA, 19 nt, Artificial Sequence
  Description of Artificial Sequence: Synthetic oligonucleotide
aaaauaagaaacgugauaa

SEQ ID NO: 1602 - RNA, 19 nt, Artificial Sequence
  Description of Artificial Sequence: Synthetic oligonucleotide
aaauaagaaacgugauaag

SEQ ID NO: 1603 - RNA, 19 nt, Artificial Sequence
  Description of Artificial Sequence: Synthetic oligonucleotide
aauaagaaacgugauaaga

SEQ ID NO: 1604 - RNA, 19 nt, Artificial Sequence
  Description of Artificial Sequence: Synthetic oligonucleotide
auaagaaacgugauaagaa

SEQ ID NO: 1605 - RNA, 19 nt, Artificial Sequence
  Description of Artificial Sequence: Synthetic oligonucleotide
uaagaaacgugauaagaau

SEQ ID NO: 1606 - RNA, 19 nt, Artificial Sequence
  Description of Artificial Sequence: Synthetic oligonucleotide
aagaaacgugauaagaaua

SEQ ID NO: 1607 - RNA, 19 nt, Artificial Sequence
  Description of Artificial Sequence: Synthetic oligonucleotide
agaaacgugauaagaauau

SEQ ID NO: 1608 - RNA, 19 nt, Artificial Sequence
  Description of Artificial Sequence: Synthetic oligonucleotide
gaaacgugauaagaauaua

SEQ ID NO: 1609 - RNA, 19 nt, Artificial Sequence
  Description of Artificial Sequence: Synthetic oligonucleotide
aaacgugauaagaauauag

SEQ ID NO: 1610 - RNA, 19 nt, Artificial Sequence
  Description of Artificial Sequence: Synthetic oligonucleotide
aacgugauaagaauauaga

SEQ ID NO: 1611 - RNA, 19 nt, Artificial Sequence
  Description of Artificial Sequence: Synthetic oligonucleotide
acgugauaagaauauagau

SEQ ID NO: 1612 - RNA, 19 nt, Artificial Sequence
  Description of Artificial Sequence: Synthetic oligonucleotide
cgugauaagaauauagaug

SEQ ID NO: 1613 - RNA, 19 nt, Artificial Sequence
  Description of Artificial Sequence: Synthetic oligonucleotide
gugauaagaauauagauga

SEQ ID NO: 1614 - RNA, 19 nt, Artificial Sequence
  Description of Artificial Sequence: Synthetic oligonucleotide
ugauaagaauauagaugau

SEQ ID NO: 1615 - RNA, 19 nt, Artificial Sequence
  Description of Artificial Sequence: Synthetic oligonucleotide
gauaagaauauagaugauc

SEQ ID NO: 1616 - RNA, 19 nt, Artificial Sequence
  Description of Artificial Sequence: Synthetic oligonucleotide
auaagaauauagaugauca

SEQ ID NO: 1617 - RNA, 19 nt, Artificial Sequence
  Description of Artificial Sequence: Synthetic oligonucleotide
uaagaauauagaugaucac

SEQ ID NO: 1618 - RNA, 19 nt, Artificial Sequence
  Description of Artificial Sequence: Synthetic oligonucleotide
aagaauauagaugaucaca

SEQ ID NO: 1619 - RNA, 19 nt, Artificial Sequence
  Description of Artificial Sequence: Synthetic oligonucleotide
agaauauagaugaucacaa

SEQ ID NO: 1620 - RNA, 19 nt, Artificial Sequence
  Description of Artificial Sequence: Synthetic oligonucleotide
gaauauagaugaucacaaa

SEQ ID NO: 1621 - RNA, 19 nt, Artificial Sequence
  Description of Artificial Sequence: Synthetic oligonucleotide
aauauagaugaucacaaaa

SEQ ID NO: 1622 - RNA, 19 nt, Artificial Sequence
  Description of Artificial Sequence: Synthetic oligonucleotide
auauagaugaucacaaaaa

SEQ ID NO: 1623 - RNA, 19 nt, Artificial Sequence
  Description of Artificial Sequence: Synthetic oligonucleotide
uauagaugaucacaaaaag

SEQ ID NO: 1624 - RNA, 19 nt, Artificial Sequence
  Description of Artificial Sequence: Synthetic oligonucleotide
auagaugaucacaaaaagg

SEQ ID NO: 1625 - RNA, 19 nt, Artificial Sequence
  Description of Artificial Sequence: Synthetic oligonucleotide
uagaugaucacaaaaaggg

SEQ ID NO: 1626 - RNA, 19 nt, Artificial Sequence
  Description of Artificial Sequence: Synthetic oligonucleotide
agaugaucacaaaaaggga

SEQ ID NO: 1627 - RNA, 19 nt, Artificial Sequence
  Description of Artificial Sequence: Synthetic oligonucleotide
gaugaucacaaaaagggag

SEQ ID NO: 1628 - RNA, 19 nt, Artificial Sequence
  Description of Artificial Sequence: Synthetic oligonucleotide
augaucacaaaaagggaga

SEQ ID NO: 1629 - RNA, 19 nt, Artificial Sequence
  Description of Artificial Sequence: Synthetic oligonucleotide
ugaucacaaaaagggagaa

SEQ ID NO: 1630 - RNA, 19 nt, Artificial Sequence
  Description of Artificial Sequence: Synthetic oligonucleotide
gaucacaaaaagggagaaa

SEQ ID NO: 1631 - RNA, 19 nt, Artificial Sequence
  Description of Artificial Sequence: Synthetic oligonucleotide
aucacaaaaagggagaaag

SEQ ID NO: 1632 - RNA, 19 nt, Artificial Sequence
  Description of Artificial Sequence: Synthetic oligonucleotide
ucacaaaaagggagaaaga

SEQ ID NO: 1633 - RNA, 19 nt, Artificial Sequence
  Description of Artificial Sequence: Synthetic oligonucleotide
cacaaaaagggagaaagaa

SEQ ID NO: 1634 - RNA, 19 nt, Artificial Sequence
  Description of Artificial Sequence: Synthetic oligonucleotide
acaaaaagggagaaagaaa

SEQ ID NO: 1635 - RNA, 19 nt, Artificial Sequence
  Description of Artificial Sequence: Synthetic oligonucleotide
caaaaagggagaaagaaaa

SEQ ID NO: 1636 - RNA, 19 nt, Artificial Sequence
  Description of Artificial Sequence: Synthetic oligonucleotide
aaaaagggagaaagaaaac

SEQ ID NO: 1637 - RNA, 19 nt, Artificial Sequence
  Description of Artificial Sequence: Synthetic oligonucleotide
aaaagggagaaagaaaaca

SEQ ID NO: 1638 - RNA, 19 nt, Artificial Sequence
  Description of Artificial Sequence: Synthetic oligonucleotide
aaagggagaaagaaaacau

SEQ ID NO: 1639 - RNA, 19 nt, Artificial Sequence
  Description of Artificial Sequence: Synthetic oligonucleotide
aagggagaaagaaaacaug

SEQ ID NO: 1640 - RNA, 19 nt, Artificial Sequence
  Description of Artificial Sequence: Synthetic oligonucleotide
agggagaaagaaaacauga

SEQ ID NO: 1641 - RNA, 19 nt, Artificial Sequence
  Description of Artificial Sequence: Synthetic oligonucleotide
gggagaaagaaaacaugaa

SEQ ID NO: 1642 - RNA, 19 nt, Artificial Sequence
  Description of Artificial Sequence: Synthetic oligonucleotide
ggagaaagaaaacaugaac

SEQ ID NO: 1643 - RNA, 19 nt, Artificial Sequence
  Description of Artificial Sequence: Synthetic oligonucleotide
gagaaagaaaacaugaacu

SEQ ID NO: 1644 - RNA, 19 nt, Artificial Sequence
  Description of Artificial Sequence: Synthetic oligonucleotide
agaaagaaaacaugaacug

SEQ ID NO: 1645 - RNA, 19 nt, Artificial Sequence
  Description of Artificial Sequence: Synthetic oligonucleotide
gaaagaaaacaugaacuga

SEQ ID NO: 1646 - RNA, 19 nt, Artificial Sequence
  Description of Artificial Sequence: Synthetic oligonucleotide
aaagaaaacaugaacugaa

SEQ ID NO: 1647 - RNA, 19 nt, Artificial Sequence
  Description of Artificial Sequence: Synthetic oligonucleotide
aagaaaacaugaacugaau

SEQ ID NO: 1648 - RNA, 19 nt, Artificial Sequence
  Description of Artificial Sequence: Synthetic oligonucleotide
agaaaacaugaacugaaua

SEQ ID NO: 1649 - RNA, 19 nt, Artificial Sequence
  Description of Artificial Sequence: Synthetic oligonucleotide
gaaaacaugaacugaauag

SEQ ID NO: 1650 - RNA, 19 nt, Artificial Sequence
  Description of Artificial Sequence: Synthetic oligonucleotide
aaaacaugaacugaauaga

SEQ ID NO: 1651 - RNA, 19 nt, Artificial Sequence
  Description of Artificial Sequence: Synthetic oligonucleotide
aaacaugaacugaauagau

SEQ ID NO: 1652 - RNA, 19 nt, Artificial Sequence
  Description of Artificial Sequence: Synthetic oligonucleotide
aacaugaacugaauagauu

SEQ ID NO: 1653 - RNA, 19 nt, Artificial Sequence
  Description of Artificial Sequence: Synthetic oligonucleotide
acaugaacugaauagauua

SEQ ID NO: 1654 - RNA, 19 nt, Artificial Sequence
  Description of Artificial Sequence: Synthetic oligonucleotide
caugaacugaauagauuag

SEQ ID NO: 1655 - RNA, 19 nt, Artificial Sequence
  Description of Artificial Sequence: Synthetic oligonucleotide
augaacugaauagauuaga

SEQ ID NO: 1656 - RNA, 19 nt, Artificial Sequence
  Description of Artificial Sequence: Synthetic oligonucleotide
ugaacugaauagauuagaa

SEQ ID NO: 1657 - RNA, 19 nt, Artificial Sequence
  Description of Artificial Sequence: Synthetic oligonucleotide
gaacugaauagauuagaau

SEQ ID NO: 1658 - RNA, 19 nt, Artificial Sequence
  Description of Artificial Sequence: Synthetic oligonucleotide
aacugaauagauuagaaug

SEQ ID NO: 1659 - RNA, 19 nt, Artificial Sequence
  Description of Artificial Sequence: Synthetic oligonucleotide
acugaauagauuagaaugg

SEQ ID NO: 1660 - RNA, 19 nt, Artificial Sequence
  Description of Artificial Sequence: Synthetic oligonucleotide
cugaauagauuagaauggg

SEQ ID NO: 1661 - RNA, 19 nt, Artificial Sequence
  Description of Artificial Sequence: Synthetic oligonucleotide
ugaauagauuagaaugggu

SEQ ID NO: 1662 - RNA, 19 nt, Artificial Sequence
  Description of Artificial Sequence: Synthetic oligonucleotide
gaauagauuagaaugggug

SEQ ID NO: 1663 - RNA, 19 nt, Artificial Sequence
  Description of Artificial Sequence: Synthetic oligonucleotide
aauagauuagaauggguga

SEQ ID NO: 1664 - RNA, 19 nt, Artificial Sequence
  Description of Artificial Sequence: Synthetic oligonucleotide
auagauuagaaugggugac

SEQ ID NO: 1665 - RNA, 19 nt, Artificial Sequence
  Description of Artificial Sequence: Synthetic oligonucleotide
uagauuagaaugggugaca

SEQ ID NO: 1666 - RNA, 19 nt, Artificial Sequence
  Description of Artificial Sequence: Synthetic oligonucleotide
agauuagaaugggugacaa

SEQ ID NO: 1667 - RNA, 19 nt, Artificial Sequence
  Description of Artificial Sequence: Synthetic oligonucleotide
gauuagaaugggugacaaa

SEQ ID NO: 1668 - RNA, 19 nt, Artificial Sequence
  Description of Artificial Sequence: Synthetic oligonucleotide
auuagaaugggugacaaau

SEQ ID NO: 1669 - RNA, 19 nt, Artificial Sequence
  Description of Artificial Sequence: Synthetic oligonucleotide
uuagaaugggugacaaaug

SEQ ID NO: 1670 - RNA, 19 nt, Artificial Sequence
  Description of Artificial Sequence: Synthetic oligonucleotide
uagaaugggugacaaaugc

SEQ ID NO: 1671 - RNA, 19 nt, Artificial Sequence
  Description of Artificial Sequence: Synthetic oligonucleotide
agaaugggugacaaaugca

SEQ ID NO: 1672 - RNA, 19 nt, Artificial Sequence
  Description of Artificial Sequence: Synthetic oligonucleotide
gaaugggugacaaaugcag

SEQ ID NO: 1673 - RNA, 19 nt, Artificial Sequence
  Description of Artificial Sequence: Synthetic oligonucleotide
aaugggugacaaaugcagu

SEQ ID NO: 1674 - RNA, 19 nt, Artificial Sequence
  Description of Artificial Sequence: Synthetic oligonucleotide
augggugacaaaugcagug

SEQ ID NO: 1675 - RNA, 19 nt, Artificial Sequence
  Description of Artificial Sequence: Synthetic oligonucleotide
ugggugacaaaugcagugc

SEQ ID NO: 1676 - RNA, 19 nt, Artificial Sequence
  Description of Artificial Sequence: Synthetic oligonucleotide
gggugacaaaugcagugca

SEQ ID NO: 1677 - RNA, 19 nt, Artificial Sequence
  Description of Artificial Sequence: Synthetic oligonucleotide
ggugacaaaugcagugcag

SEQ ID NO: 1678 - RNA, 19 nt, Artificial Sequence
  Description of Artificial Sequence: Synthetic oligonucleotide
gugacaaaugcagugcagc

SEQ ID NO: 1679 - RNA, 19 nt, Artificial Sequence
  Description of Artificial Sequence: Synthetic oligonucleotide
ugacaaaugcagugcagcc

SEQ ID NO: 1680 - RNA, 19 nt, Artificial Sequence
  Description of Artificial Sequence: Synthetic oligonucleotide
gacaaaugcagugcagcca

SEQ ID NO: 1681 - RNA, 19 nt, Artificial Sequence
  Description of Artificial Sequence: Synthetic oligonucleotide
acaaaugcagugcagccag

SEQ ID NO: 1682 - RNA, 19 nt, Artificial Sequence
  Description of Artificial Sequence: Synthetic oligonucleotide
caaaugcagugcagccagu

SEQ ID NO: 1683 - RNA, 19 nt, Artificial Sequence
  Description of Artificial Sequence: Synthetic oligonucleotide
aaaugcagugcagccagug

SEQ ID NO: 1684 - RNA, 19 nt, Artificial Sequence
  Description of Artificial Sequence: Synthetic oligonucleotide
aaugcagugcagccagugu

SEQ ID NO: 1685 - RNA, 19 nt, Artificial Sequence
  Description of Artificial Sequence: Synthetic oligonucleotide
augcagugcagccaguguu

SEQ ID NO: 1686 - RNA, 19 nt, Artificial Sequence
  Description of Artificial Sequence: Synthetic oligonucleotide
ugcagugcagccaguguuu

SEQ ID NO: 1687 - RNA, 19 nt, Artificial Sequence
  Description of Artificial Sequence: Synthetic oligonucleotide
gcagugcagccaguguuuc

SEQ ID NO: 1688 - RNA, 19 nt, Artificial Sequence
  Description of Artificial Sequence: Synthetic oligonucleotide
cagugcagccaguguuucc

SEQ ID NO: 1689 - RNA, 19 nt, Artificial Sequence
  Description of Artificial Sequence: Synthetic oligonucleotide
agugcagccaguguuucca

SEQ ID NO: 1690 - RNA, 19 nt, Artificial Sequence
  Description of Artificial Sequence: Synthetic oligonucleotide
gugcagccaguguuuccau

SEQ ID NO: 1691 - RNA, 19 nt, Artificial Sequence
  Description of Artificial Sequence: Synthetic oligonucleotide
ugcagccaguguuuccauu

SEQ ID NO: 1692 - RNA, 19 nt, Artificial Sequence
  Description of Artificial Sequence: Synthetic oligonucleotide
gcagccaguguuuccauua

SEQ ID NO: 1693 - RNA, 19 nt, Artificial Sequence
  Description of Artificial Sequence: Synthetic oligonucleotide
cagccaguguuuccauuau

SEQ ID NO: 1694 - RNA, 19 nt, Artificial Sequence
  Description of Artificial Sequence: Synthetic oligonucleotide
agccaguguuuccauuaug

SEQ ID NO: 1695 - RNA, 19 nt, Artificial Sequence
  Description of Artificial Sequence: Synthetic oligonucleotide
gccaguguuuccauuaugc

SEQ ID NO: 1696 - RNA, 19 nt, Artificial Sequence
  Description of Artificial Sequence: Synthetic oligonucleotide
ccaguguuuccauuaugca

SEQ ID NO: 1697 - RNA, 19 nt, Artificial Sequence
  Description of Artificial Sequence: Synthetic oligonucleotide
caguguuuccauuaugcaa

SEQ ID NO: 1698 - RNA, 19 nt, Artificial Sequence
  Description of Artificial Sequence: Synthetic oligonucleotide
aguguuuccauuaugcaac

SEQ ID NO: 1699 - RNA, 19 nt, Artificial Sequence
  Description of Artificial Sequence: Synthetic oligonucleotide
guguuuccauuaugcaacu

SEQ ID NO: 1700 - RNA, 19 nt, Artificial Sequence
  Description of Artificial Sequence: Synthetic oligonucleotide
uguuuccauuaugcaacuu

SEQ ID NO: 1701 - RNA, 19 nt, Artificial Sequence
  Description of Artificial Sequence: Synthetic oligonucleotide
guuuccauuaugcaacuug

SEQ ID NO: 1702 - RNA, 19 nt, Artificial Sequence
  Description of Artificial Sequence: Synthetic oligonucleotide
uuuccauuaugcaacuugu

SEQ ID NO: 1703 - RNA, 19 nt, Artificial Sequence
  Description of Artificial Sequence: Synthetic oligonucleotide
uuccauuaugcaacuuguc

SEQ ID NO: 1704 - RNA, 19 nt, Artificial Sequence
  Description of Artificial Sequence: Synthetic oligonucleotide
uccauuaugcaacuugucu

SEQ ID NO: 1705 - RNA, 19 nt, Artificial Sequence
  Description of Artificial Sequence: Synthetic oligonucleotide
ccauuaugcaacuugucua

SEQ ID NO: 1706 - RNA, 19 nt, Artificial Sequence
  Description of Artificial Sequence: Synthetic oligonucleotide
cauuaugcaacuugucuau

SEQ ID NO: 1707 - RNA, 19 nt, Artificial Sequence
  Description of Artificial Sequence: Synthetic oligonucleotide
auuaugcaacuugucuaug

SEQ ID NO: 1708 - RNA, 19 nt, Artificial Sequence
  Description of Artificial Sequence: Synthetic oligonucleotide
uuaugcaacuugucuaugu

SEQ ID NO: 1709 - RNA, 19 nt, Artificial Sequence
  Description of Artificial Sequence: Synthetic oligonucleotide
uaugcaacuugucuaugua

SEQ ID NO: 1710 - RNA, 19 nt, Artificial Sequence
  Description of Artificial Sequence: Synthetic oligonucleotide
augcaacuugucuauguaa

SEQ ID NO: 1711 - RNA, 19 nt, Artificial Sequence
  Description of Artificial Sequence: Synthetic oligonucleotide
ugcaacuugucuauguaaa

SEQ ID NO: 1712 - RNA, 19 nt, Artificial Sequence
  Description of Artificial Sequence: Synthetic oligonucleotide
gcaacuugucuauguaaau

SEQ ID NO: 1713 - RNA, 19 nt, Artificial Sequence
  Description of Artificial Sequence: Synthetic oligonucleotide
caacuugucuauguaaaua

SEQ ID NO: 1714 - RNA, 19 nt, Artificial Sequence
  Description of Artificial Sequence: Synthetic oligonucleotide
aacuugucuauguaaauaa

SEQ ID NO: 1715 - RNA, 19 nt, Artificial Sequence
  Description of Artificial Sequence: Synthetic oligonucleotide
acuugucuauguaaauaau

SEQ ID NO: 1716 - RNA, 19 nt, Artificial Sequence
  Description of Artificial Sequence: Synthetic oligonucleotide
cuugucuauguaaauaaug

SEQ ID NO: 1717 - RNA, 19 nt, Artificial Sequence
  Description of Artificial Sequence: Synthetic oligonucleotide
uugucuauguaaauaaugu

SEQ ID NO: 1718 - RNA, 19 nt, Artificial Sequence
  Description of Artificial Sequence: Synthetic oligonucleotide
ugucuauguaaauaaugua

SEQ ID NO: 1719 - RNA, 19 nt, Artificial Sequence
  Description of Artificial Sequence: Synthetic oligonucleotide
gucuauguaaauaauguac

SEQ ID NO: 1720 - RNA, 19 nt, Artificial Sequence
  Description of Artificial Sequence: Synthetic oligonucleotide
ucuauguaaauaauguaca

SEQ ID NO: 1721 - RNA, 19 nt, Artificial Sequence
  Description of Artificial Sequence: Synthetic oligonucleotide
cuauguaaauaauguacac

SEQ ID NO: 1722 - RNA, 19 nt, Artificial Sequence
  Description of Artificial Sequence: Synthetic oligonucleotide
uauguaaauaauguacaca

SEQ ID NO: 1723 - RNA, 19 nt, Artificial Sequence
  Description of Artificial Sequence: Synthetic oligonucleotide
auguaaauaauguacacau

SEQ ID NO: 1724 - RNA, 19 nt, Artificial Sequence
  Description of Artificial Sequence: Synthetic oligonucleotide
uguaaauaauguacacauu

SEQ ID NO: 1725 - RNA, 19 nt, Artificial Sequence
  Description of Artificial Sequence: Synthetic oligonucleotide
guaaauaauguacacauuu

SEQ ID NO: 1726 - RNA, 19 nt, Artificial Sequence
  Description of Artificial Sequence: Synthetic oligonucleotide
uaaauaauguacacauuug

SEQ ID NO: 1727 - RNA, 19 nt, Artificial Sequence
  Description of Artificial Sequence: Synthetic oligonucleotide
aaauaauguacacauuugu

SEQ ID NO: 1728 - RNA, 19 nt, Artificial Sequence
  Description of Artificial Sequence: Synthetic oligonucleotide
aauaauguacacauuugug

SEQ ID NO: 1729 - RNA, 19 nt, Artificial Sequence
  Description of Artificial Sequence: Synthetic oligonucleotide
auaauguacacauuugugg

SEQ ID NO: 1730 - RNA, 19 nt, Artificial Sequence
  Description of Artificial Sequence: Synthetic oligonucleotide
uaauguacacauuugugga

SEQ ID NO: 1731 - RNA, 19 nt, Artificial Sequence
  Description of Artificial Sequence: Synthetic oligonucleotide
aauguacacauuuguggaa

SEQ ID NO: 1732 - RNA, 19 nt, Artificial Sequence
  Description of Artificial Sequence: Synthetic oligonucleotide
auguacacauuuguggaaa

SEQ ID NO: 1733 - RNA, 19 nt, Artificial Sequence
  Description of Artificial Sequence: Synthetic oligonucleotide
uguacacauuuguggaaaa

SEQ ID NO: 1734 - RNA, 19 nt, Artificial Sequence
  Description of Artificial Sequence: Synthetic oligonucleotide
guacacauuuguggaaaau

SEQ ID NO: 1735 - RNA, 19 nt, Artificial Sequence
  Description of Artificial Sequence: Synthetic oligonucleotide
uacacauuuguggaaaaug

SEQ ID NO: 1736 - RNA, 19 nt, Artificial Sequence
  Description of Artificial Sequence: Synthetic oligonucleotide
acacauuuguggaaaaugc

SEQ ID NO: 1737 - RNA, 19 nt, Artificial Sequence
  Description of Artificial Sequence: Synthetic oligonucleotide
cacauuuguggaaaaugcu

SEQ ID NO: 1738 - RNA, 19 nt, Artificial Sequence
  Description of Artificial Sequence: Synthetic oligonucleotide
acauuuguggaaaaugcua

SEQ ID NO: 1739 - RNA, 19 nt, Artificial Sequence
  Description of Artificial Sequence: Synthetic oligonucleotide
cauuuguggaaaaugcuau

SEQ ID NO: 1740 - RNA, 19 nt, Artificial Sequence
  Description of Artificial Sequence: Synthetic oligonucleotide
auuuguggaaaaugcuauu

SEQ ID NO: 1741 - RNA, 19 nt, Artificial Sequence
  Description of Artificial Sequence: Synthetic oligonucleotide
uuuguggaaaaugcuauua

SEQ ID NO: 1742 - RNA, 19 nt, Artificial Sequence
  Description of Artificial Sequence: Synthetic oligonucleotide
uuguggaaaaugcuauuau

SEQ ID NO: 1743 - RNA, 19 nt, Artificial Sequence
  Description of Artificial Sequence: Synthetic oligonucleotide
uguggaaaaugcuauuauu

SEQ ID NO: 1744 - RNA, 19 nt, Artificial Sequence
  Description of Artificial Sequence: Synthetic oligonucleotide
guggaaaaugcuauuauua

SEQ ID NO: 1745 - RNA, 19 nt, Artificial Sequence
  Description of Artificial Sequence: Synthetic oligonucleotide
uggaaaaugcuauuauuaa

SEQ ID NO: 1746 - RNA, 19 nt, Artificial Sequence
  Description of Artificial Sequence: Synthetic oligonucleotide
ggaaaaugcuauuauuaag

SEQ ID NO: 1747 - RNA, 19 nt, Artificial Sequence
  Description of Artificial Sequence: Synthetic oligonucleotide
gaaaaugcuauuauuaaga

SEQ ID NO: 1748 - RNA, 19 nt, Artificial Sequence
  Description of Artificial Sequence: Synthetic oligonucleotide
aaaaugcuauuauuaagag

SEQ ID NO: 1749 - RNA, 19 nt, Artificial Sequence
  Description of Artificial Sequence: Synthetic oligonucleotide
aaaugcuauuauuaagaga

SEQ ID NO: 1750 - RNA, 19 nt, Artificial Sequence
  Description of Artificial Sequence: Synthetic oligonucleotide
aaugcuauuauuaagagaa

SEQ ID NO: 1751 - RNA, 19 nt, Artificial Sequence
  Description of Artificial Sequence: Synthetic oligonucleotide
augcuauuauuaagagaac

SEQ ID NO: 1752 - RNA, 19 nt, Artificial Sequence
  Description of Artificial Sequence: Synthetic oligonucleotide
ugcuauuauuaagagaaca

SEQ ID NO: 1753 - RNA, 19 nt, Artificial Sequence
  Description of Artificial Sequence: Synthetic oligonucleotide
gcuauuauuaagagaacaa

SEQ ID NO: 1754 - RNA, 19 nt, Artificial Sequence
  Description of Artificial Sequence: Synthetic oligonucleotide
cuauuauuaagagaacaag

SEQ ID NO: 1755 - RNA, 19 nt, Artificial Sequence
  Description of Artificial Sequence: Synthetic oligonucleotide
uauuauuaagagaacaagc

SEQ ID NO: 1756 - RNA, 19 nt, Artificial Sequence
  Description of Artificial Sequence: Synthetic oligonucleotide
auuauuaagagaacaagca

SEQ ID NO: 1757 - RNA, 19 nt, Artificial Sequence
  Description of Artificial Sequence: Synthetic oligonucleotide
uuauuaagagaacaagcac

SEQ ID NO: 1758 - RNA, 19 nt, Artificial Sequence
  Description of Artificial Sequence: Synthetic oligonucleotide
uauuaagagaacaagcaca

SEQ ID NO: 1759 - RNA, 19 nt, Artificial Sequence
  Description of Artificial Sequence: Synthetic oligonucleotide
auuaagagaacaagcacac

SEQ ID NO: 1760 - RNA, 19 nt, Artificial Sequence
  Description of Artificial Sequence: Synthetic oligonucleotide
uuaagagaacaagcacaca

SEQ ID NO: 1761 - RNA, 19 nt, Artificial Sequence
  Description of Artificial Sequence: Synthetic oligonucleotide
uaagagaacaagcacacag

SEQ ID NO: 1762 - RNA, 19 nt, Artificial Sequence
  Description of Artificial Sequence: Synthetic oligonucleotide
aagagaacaagcacacagu

SEQ ID NO: 1763 - RNA, 19 nt, Artificial Sequence
  Description of Artificial Sequence: Synthetic oligonucleotide
agagaacaagcacacagug

SEQ ID NO: 1764 - RNA, 19 nt, Artificial Sequence
  Description of Artificial Sequence: Synthetic oligonucleotide
gagaacaagcacacagugg

SEQ ID NO: 1765 - RNA, 19 nt, Artificial Sequence
  Description of Artificial Sequence: Synthetic oligonucleotide
agaacaagcacacagugga

SEQ ID NO: 1766 - RNA, 19 nt, Artificial Sequence
  Description of Artificial Sequence: Synthetic oligonucleotide
gaacaagcacacaguggaa

SEQ ID NO: 1767 - RNA, 19 nt, Artificial Sequence
  Description of Artificial Sequence: Synthetic oligonucleotide
aacaagcacacaguggaaa

SEQ ID NO: 1768 - RNA, 19 nt, Artificial Sequence
  Description of Artificial Sequence: Synthetic oligonucleotide
acaagcacacaguggaaau

SEQ ID NO: 1769 - RNA, 19 nt, Artificial Sequence
  Description of Artificial Sequence: Synthetic oligonucleotide
caagcacacaguggaaauu

SEQ ID NO: 1770 - RNA, 19 nt, Artificial Sequence
  Description of Artificial Sequence: Synthetic oligonucleotide
aagcacacaguggaaauua

SEQ ID NO: 1771 - RNA, 19 nt, Artificial Sequence
  Description of Artificial Sequence: Synthetic oligonucleotide
agcacacaguggaaauuac

SEQ ID NO: 1772 - RNA, 19 nt, Artificial Sequence
  Description of Artificial Sequence: Synthetic oligonucleotide
gcacacaguggaaauuacu

SEQ ID NO: 1773 - RNA, 19 nt, Artificial Sequence
  Description of Artificial Sequence: Synthetic oligonucleotide
cacacaguggaaauuacug

SEQ ID NO: 1774 - RNA, 19 nt, Artificial Sequence
  Description of Artificial Sequence: Synthetic oligonucleotide
acacaguggaaauuacuga

SEQ ID NO: 1775 - RNA, 19 nt, Artificial Sequence
  Description of Artificial Sequence: Synthetic oligonucleotide
cacaguggaaauuacugau

SEQ ID NO: 1776 - RNA, 19 nt, Artificial Sequence
  Description of Artificial Sequence: Synthetic oligonucleotide
acaguggaaauuacugaug

SEQ ID NO: 1777 - RNA, 19 nt, Artificial Sequence
  Description of Artificial Sequence: Synthetic oligonucleotide
caguggaaauuacugauga

SEQ ID NO: 1778 - RNA, 19 nt, Artificial Sequence
  Description of Artificial Sequence: Synthetic oligonucleotide
aguggaaauuacugaugag

SEQ ID NO: 1779 - RNA, 19 nt, Artificial Sequence
  Description of Artificial Sequence: Synthetic oligonucleotide
guggaaauuacugaugagu

SEQ ID NO: 1780 - RNA, 19 nt, Artificial Sequence
  Description of Artificial Sequence: Synthetic oligonucleotide
uggaaauuacugaugagua

SEQ ID NO: 1781 - RNA, 19 nt, Artificial Sequence
  Description of Artificial Sequence: Synthetic oligonucleotide
ggaaauuacugaugaguag

SEQ ID NO: 1782 - RNA, 19 nt, Artificial Sequence
  Description of Artificial Sequence: Synthetic oligonucleotide
gaaauuacugaugaguagc

SEQ ID NO: 1783 - RNA, 19 nt, Artificial Sequence
  Description of Artificial Sequence: Synthetic oligonucleotide
aaauuacugaugaguagca

SEQ ID NO: 1784 - RNA, 19 nt, Artificial Sequence
  Description of Artificial Sequence: Synthetic oligonucleotide
aauuacugaugaguagcau

SEQ ID NO: 1785 - RNA, 19 nt, Artificial Sequence
  Description of Artificial Sequence: Synthetic oligonucleotide
auuacugaugaguagcaug

SEQ ID NO: 1786 - RNA, 19 nt, Artificial Sequence
  Description of Artificial Sequence: Synthetic oligonucleotide
uuacugaugaguagcaugu

SEQ ID NO: 1787 - RNA, 19 nt, Artificial Sequence
  Description of Artificial Sequence: Synthetic oligonucleotide
uacugaugaguagcaugug

SEQ ID NO: 1788 - RNA, 19 nt, Artificial Sequence
  Description of Artificial Sequence: Synthetic oligonucleotide
acugaugaguagcauguga

SEQ ID NO: 1789 - RNA, 19 nt, Artificial Sequence
  Description of Artificial Sequence: Synthetic oligonucleotide
cugaugaguagcaugugac

SEQ ID NO: 1790 - RNA, 19 nt, Artificial Sequence
  Description of Artificial Sequence: Synthetic oligonucleotide
ugaugaguagcaugugacu

SEQ ID NO: 1791 - RNA, 19 nt, Artificial Sequence
  Description of Artificial Sequence: Synthetic oligonucleotide
gaugaguagcaugugacuu

SEQ ID NO: 1792 - RNA, 19 nt, Artificial Sequence
  Description of Artificial Sequence: Synthetic oligonucleotide
augaguagcaugugacuuu

SEQ ID NO: 1793 - RNA, 19 nt, Artificial Sequence
  Description of Artificial Sequence: Synthetic oligonucleotide
ugaguagcaugugacuuuc

SEQ ID NO: 1794 - RNA, 19 nt, Artificial Sequence
  Description of Artificial Sequence: Synthetic oligonucleotide
gaguagcaugugacuuucc

SEQ ID NO: 1795 - RNA, 19 nt, Artificial Sequence
  Description of Artificial Sequence: Synthetic oligonucleotide
aguagcaugugacuuucca

SEQ ID NO: 1796 - RNA, 19 nt, Artificial Sequence
  Description of Artificial Sequence: Synthetic oligonucleotide
guagcaugugacuuuccaa

SEQ ID NO: 1797 - RNA, 19 nt, Artificial Sequence
  Description of Artificial Sequence: Synthetic oligonucleotide
uagcaugugacuuuccaag

SEQ ID NO: 1798 - RNA, 19 nt, Artificial Sequence
  Description of Artificial Sequence: Synthetic oligonucleotide
agcaugugacuuuccaaga

SEQ ID NO: 1799 - RNA, 19 nt, Artificial Sequence
  Description of Artificial Sequence: Synthetic oligonucleotide
gcaugugacuuuccaagag

SEQ ID NO: 1800 - RNA, 19 nt, Artificial Sequence
  Description of Artificial Sequence: Synthetic oligonucleotide
caugugacuuuccaagagu

SEQ ID NO: 1801 - RNA, 19 nt, Artificial Sequence
  Description of Artificial Sequence: Synthetic oligonucleotide
augugacuuuccaagaguu

SEQ ID NO: 1802 - RNA, 19 nt, Artificial Sequence
  Description of Artificial Sequence: Synthetic oligonucleotide
ugugacuuuccaagaguuu

SEQ ID NO: 1803 - RNA, 19 nt, Artificial Sequence
  Description of Artificial Sequence: Synthetic oligonucleotide
gugacuuuccaagaguuua

SEQ ID NO: 1804 - RNA, 19 nt, Artificial Sequence
  Description of Artificial Sequence: Synthetic oligonucleotide
ugacuuuccaagaguuuag

SEQ ID NO: 1805 - RNA, 19 nt, Artificial Sequence
  Description of Artificial Sequence: Synthetic oligonucleotide
gacuuuccaagaguuuagg

SEQ ID NO: 1806 - RNA, 19 nt, Artificial Sequence
  Description of Artificial Sequence: Synthetic oligonucleotide
acuuuccaagaguuuaggu

SEQ ID NO: 1807 - RNA, 19 nt, Artificial Sequence
  Description of Artificial Sequence: Synthetic oligonucleotide
cuuuccaagaguuuagguu

SEQ ID NO: 1808 - RNA, 19 nt, Artificial Sequence
  Description of Artificial Sequence: Synthetic oligonucleotide
uuuccaagaguuuagguug

SEQ ID NO: 1809 - RNA, 19 nt, Artificial Sequence
  Description of Artificial Sequence: Synthetic oligonucleotide
uuccaagaguuuagguugu

SEQ ID NO: 1810 - RNA, 19 nt, Artificial Sequence
  Description of Artificial Sequence: Synthetic oligonucleotide
uccaagaguuuagguugug

SEQ ID NO: 1811 - RNA, 19 nt, Artificial Sequence
  Description of Artificial Sequence: Synthetic oligonucleotide
ccaagaguuuagguugugc

SEQ ID NO: 1812 - RNA, 19 nt, Artificial Sequence
  Description of Artificial Sequence: Synthetic oligonucleotide
caagaguuuagguugugcu

SEQ ID NO: 1813 - RNA, 19 nt, Artificial Sequence
  Description of Artificial Sequence: Synthetic oligonucleotide
aagaguuuagguugugcug

SEQ ID NO: 1814 - RNA, 19 nt, Artificial Sequence
  Description of Artificial Sequence: Synthetic oligonucleotide
agaguuuagguugugcugg

SEQ ID NO: 1815 - RNA, 19 nt, Artificial Sequence
  Description of Artificial Sequence: Synthetic oligonucleotide
gaguuuagguugugcugga

SEQ ID NO: 1816 - RNA, 19 nt, Artificial Sequence
  Description of Artificial Sequence: Synthetic oligonucleotide
aguuuagguugugcuggag

SEQ ID NO: 1817 - RNA, 19 nt, Artificial Sequence
  Description of Artificial Sequence: Synthetic oligonucleotide
guuuagguugugcuggagg

SEQ ID NO: 1818 - RNA, 19 nt, Artificial Sequence
  Description of Artificial Sequence: Synthetic oligonucleotide
uuuagguugugcuggagga

SEQ ID NO: 1819 - RNA, 19 nt, Artificial Sequence
  Description of Artificial Sequence: Synthetic oligonucleotide
uuagguugugcuggaggag

SEQ ID NO: 1820 - RNA, 19 nt, Artificial Sequence
  Description of Artificial Sequence: Synthetic oligonucleotide
uagguugugcuggaggaga

SEQ ID NO: 1821 - RNA, 19 nt, Artificial Sequence
  Description of Artificial Sequence: Synthetic oligonucleotide
agguugugcuggaggagag

SEQ ID NO: 1822 - RNA, 19 nt, Artificial Sequence
  Description of Artificial Sequence: Synthetic oligonucleotide
gguugugcuggaggagagg

SEQ ID NO: 1823 - RNA, 19 nt, Artificial Sequence
  Description of Artificial Sequence: Synthetic oligonucleotide
guugugcuggaggagaggu

SEQ ID NO: 1824 - RNA, 19 nt, Artificial Sequence
  Description of Artificial Sequence: Synthetic oligonucleotide
uugugcuggaggagagguu

SEQ ID NO: 1825 - RNA, 19 nt, Artificial Sequence
  Description of Artificial Sequence: Synthetic oligonucleotide
ugugcuggaggagagguuu

SEQ ID NO: 1826 - RNA, 19 nt, Artificial Sequence
  Description of Artificial Sequence: Synthetic oligonucleotide
gugcuggaggagagguuuc

SEQ ID NO: 1827 - RNA, 19 nt, Artificial Sequence
  Description of Artificial Sequence: Synthetic oligonucleotide
ugcuggaggagagguuucc

SEQ ID NO: 1828 - RNA, 19 nt, Artificial Sequence
  Description of Artificial Sequence: Synthetic oligonucleotide
gcuggaggagagguuuccu

SEQ ID NO: 1829 - RNA, 19 nt, Artificial Sequence
  Description of Artificial Sequence: Synthetic oligonucleotide
cuggaggagagguuuccuu

SEQ ID NO: 1830 - RNA, 19 nt, Artificial Sequence
  Description of Artificial Sequence: Synthetic oligonucleotide
uggaggagagguuuccuuc

SEQ ID NO: 1831 - RNA, 19 nt, Artificial Sequence
  Description of Artificial Sequence: Synthetic oligonucleotide
ggaggagagguuuccuuca

SEQ ID NO: 1832 - RNA, 19 nt, Artificial Sequence
  Description of Artificial Sequence: Synthetic oligonucleotide
gaggagagguuuccuucag

SEQ ID NO: 1833 - RNA, 19 nt, Artificial Sequence
  Description of Artificial Sequence: Synthetic oligonucleotide
aggagagguuuccuucaga

SEQ ID NO: 1834 - RNA, 19 nt, Artificial Sequence
  Description of Artificial Sequence: Synthetic oligonucleotide
ggagagguuuccuucagau

SEQ ID NO: 1835 - RNA, 19 nt, Artificial Sequence
  Description of Artificial Sequence: Synthetic oligonucleotide
gagagguuuccuucagauu

SEQ ID NO: 1836 - RNA, 19 nt, Artificial Sequence
  Description of Artificial Sequence: Synthetic oligonucleotide
agagguuuccuucagauug

SEQ ID NO: 1837 - RNA, 19 nt, Artificial Sequence
  Description of Artificial Sequence: Synthetic oligonucleotide
gagguuuccuucagauugc

SEQ ID NO: 1838 - RNA, 19 nt, Artificial Sequence
  Description of Artificial Sequence: Synthetic oligonucleotide
agguuuccuucagauugcu

SEQ ID NO: 1839 - RNA, 19 nt, Artificial Sequence
  Description of Artificial Sequence: Synthetic oligonucleotide
gguuuccuucagauugcug

SEQ ID NO: 1840 - RNA, 19 nt, Artificial Sequence
  Description of Artificial Sequence: Synthetic oligonucleotide
guuuccuucagauugcuga

SEQ ID NO: 1841 - RNA, 19 nt, Artificial Sequence
  Description of Artificial Sequence: Synthetic oligonucleotide
uuuccuucagauugcugau

SEQ ID NO: 1842 - RNA, 19 nt, Artificial Sequence
  Description of Artificial Sequence: Synthetic oligonucleotide
uuccuucagauugcugauu

SEQ ID NO: 1843 - RNA, 19 nt, Artificial Sequence
  Description of Artificial Sequence: Synthetic oligonucleotide
uccuucagauugcugauug

SEQ ID NO: 1844 - RNA, 19 nt, Artificial Sequence
  Description of Artificial Sequence: Synthetic oligonucleotide
ccuucagauugcugauugc

SEQ ID NO: 1845 - RNA, 19 nt, Artificial Sequence
  Description of Artificial Sequence: Synthetic oligonucleotide
cuucagauugcugauugcu

SEQ ID NO: 1846 - RNA, 19 nt, Artificial Sequence
  Description of Artificial Sequence: Synthetic oligonucleotide
uucagauugcugauugcuu

SEQ ID NO: 1847 - RNA, 19 nt, Artificial Sequence
  Description of Artificial Sequence: Synthetic oligonucleotide
ucagauugcugauugcuua

SEQ ID NO: 1848 - RNA, 19 nt, Artificial Sequence
  Description of Artificial Sequence: Synthetic oligonucleotide
cagauugcugauugcuuau

SEQ ID NO: 1849 - RNA, 19 nt, Artificial Sequence
  Description of Artificial Sequence: Synthetic oligonucleotide
agauugcugauugcuuaua

SEQ ID NO: 1850 - RNA, 19 nt, Artificial Sequence
  Description of Artificial Sequence: Synthetic oligonucleotide
gauugcugauugcuuauac

SEQ ID NO: 1851 - RNA, 19 nt, Artificial Sequence
  Description of Artificial Sequence: Synthetic oligonucleotide
auugcugauugcuuauaca

SEQ ID NO: 1852 - RNA, 19 nt, Artificial Sequence
  Description of Artificial Sequence: Synthetic oligonucleotide
uugcugauugcuuauacaa

SEQ ID NO: 1853 - RNA, 19 nt, Artificial Sequence
  Description of Artificial Sequence: Synthetic oligonucleotide
ugcugauugcuuauacaaa

SEQ ID NO: 1854 - RNA, 19 nt, Artificial Sequence
  Description of Artificial Sequence: Synthetic oligonucleotide
gcugauugcuuauacaaau

SEQ ID NO: 1855 - RNA, 19 nt, Artificial Sequence
  Description of Artificial Sequence: Synthetic oligonucleotide
cugauugcuuauacaaaua

SEQ ID NO: 1856 - RNA, 19 nt, Artificial Sequence
  Description of Artificial Sequence: Synthetic oligonucleotide
ugauugcuuauacaaauaa

SEQ ID NO: 1857 - RNA, 19 nt, Artificial Sequence
  Description of Artificial Sequence: Synthetic oligonucleotide
gauugcuuauacaaauaac

SEQ ID NO: 1858 - RNA, 19 nt, Artificial Sequence
  Description of Artificial Sequence: Synthetic oligonucleotide
auugcuuauacaaauaacc

SEQ ID NO: 1859 - RNA, 19 nt, Artificial Sequence
  Description of Artificial Sequence: Synthetic oligonucleotide
uugcuuauacaaauaaccu

SEQ ID NO: 1860 - RNA, 19 nt, Artificial Sequence
  Description of Artificial Sequence: Synthetic oligonucleotide
ugcuuauacaaauaaccua

SEQ ID NO: 1861 - RNA, 19 nt, Artificial Sequence
  Description of Artificial Sequence: Synthetic oligonucleotide
gcuuauacaaauaaccuac

SEQ ID NO: 1862 - RNA, 19 nt, Artificial Sequence
  Description of Artificial Sequence: Synthetic oligonucleotide
cuuauacaaauaaccuaca

SEQ ID NO: 1863 - RNA, 19 nt, Artificial Sequence
  Description of Artificial Sequence: Synthetic oligonucleotide
uuauacaaauaaccuacau

SEQ ID NO: 1864 - RNA, 19 nt, Artificial Sequence
  Description of Artificial Sequence: Synthetic oligonucleotide
uauacaaauaaccuacaug

SEQ ID NO: 1865 - RNA, 19 nt, Artificial Sequence
  Description of Artificial Sequence: Synthetic oligonucleotide
auacaaauaaccuacaugc

SEQ ID NO: 1866 - RNA, 19 nt, Artificial Sequence
  Description of Artificial Sequence: Synthetic oligonucleotide
uacaaauaaccuacaugcc

SEQ ID NO: 1867 - RNA, 19 nt, Artificial Sequence
  Description of Artificial Sequence: Synthetic oligonucleotide
acaaauaaccuacaugcca

SEQ ID NO: 1868 - RNA, 19 nt, Artificial Sequence
  Description of Artificial Sequence: Synthetic oligonucleotide
caaauaaccuacaugccag

SEQ ID NO: 1869 - RNA, 19 nt, Artificial Sequence
  Description of Artificial Sequence: Synthetic oligonucleotide
aaauaaccuacaugccaga

SEQ ID NO: 1870 - RNA, 19 nt, Artificial Sequence
  Description of Artificial Sequence: Synthetic oligonucleotide
aauaaccuacaugccagau

SEQ ID NO: 1871 - RNA, 19 nt, Artificial Sequence
  Description of Artificial Sequence: Synthetic oligonucleotide
auaaccuacaugccagauu

SEQ ID NO: 1872 - RNA, 19 nt, Artificial Sequence
  Description of Artificial Sequence: Synthetic oligonucleotide
uaaccuacaugccagauuu

SEQ ID NO: 1873 - RNA, 19 nt, Artificial Sequence
  Description of Artificial Sequence: Synthetic oligonucleotide
aaccuacaugccagauuuc

SEQ ID NO: 1874 - RNA, 19 nt, Artificial Sequence
  Description of Artificial Sequence: Synthetic oligonucleotide
accuacaugccagauuucu

SEQ ID NO: 1875 - RNA, 19 nt, Artificial Sequence
  Description of Artificial Sequence: Synthetic oligonucleotide
ccuacaugccagauuucua

SEQ ID NO: 1876 - RNA, 19 nt, Artificial Sequence
  Description of Artificial Sequence: Synthetic oligonucleotide
cuacaugccagauuucuau

SEQ ID NO: 1877 - RNA, 19 nt, Artificial Sequence
  Description of Artificial Sequence: Synthetic oligonucleotide
uacaugccagauuucuauu

SEQ ID NO: 1878 - RNA, 19 nt, Artificial Sequence
  Description of Artificial Sequence: Synthetic oligonucleotide
acaugccagauuucuauuc

SEQ ID NO: 1879 - RNA, 19 nt, Artificial Sequence
  Description of Artificial Sequence: Synthetic oligonucleotide
caugccagauuucuauuca

SEQ ID NO: 1880 - RNA, 19 nt, Artificial Sequence
  Description of Artificial Sequence: Synthetic oligonucleotide
augccagauuucuauucaa

SEQ ID NO: 1881 - RNA, 19 nt, Artificial Sequence
  Description of Artificial Sequence: Synthetic oligonucleotide
ugccagauuucuauucaac

SEQ ID NO: 1882 - RNA, 19 nt, Artificial Sequence
  Description of Artificial Sequence: Synthetic oligonucleotide
gccagauuucuauucaacg

SEQ ID NO: 1883 - RNA, 19 nt, Artificial Sequence
  Description of Artificial Sequence: Synthetic oligonucleotide
ccagauuucuauucaacgu

SEQ ID NO: 1884 - RNA, 19 nt, Artificial Sequence
  Description of Artificial Sequence: Synthetic oligonucleotide
cagauuucuauucaacguu

SEQ ID NO: 1885 - RNA, 19 nt, Artificial Sequence
  Description of Artificial Sequence: Synthetic oligonucleotide
agauuucuauucaacguua

SEQ ID NO: 1886 - RNA, 19 nt, Artificial Sequence
  Description of Artificial Sequence: Synthetic oligonucleotide
gauuucuauucaacguuag

SEQ ID NO: 1887 - RNA, 19 nt, Artificial Sequence
  Description of Artificial Sequence: Synthetic oligonucleotide
auuucuauucaacguuaga

SEQ ID NO: 1888 - RNA, 19 nt, Artificial Sequence
  Description of Artificial Sequence: Synthetic oligonucleotide
uuucuauucaacguuagag

SEQ ID NO: 1889 - RNA, 19 nt, Artificial Sequence
  Description of Artificial Sequence: Synthetic oligonucleotide
uucuauucaacguuagagu

SEQ ID NO: 1890 - RNA, 19 nt, Artificial Sequence
  Description of Artificial Sequence: Synthetic oligonucleotide
ucuauucaacguuagaguu

SEQ ID NO: 1891 - RNA, 19 nt, Artificial Sequence
  Description of Artificial Sequence: Synthetic oligonucleotide
cuauucaacguuagaguuu

SEQ ID NO: 1892 - RNA, 19 nt, Artificial Sequence
  Description of Artificial Sequence: Synthetic oligonucleotide
uauucaacguuagaguuua

SEQ ID NO: 1893 - RNA, 19 nt, Artificial Sequence
  Description of Artificial Sequence: Synthetic oligonucleotide
auucaacguuagaguuuaa

SEQ ID NO: 1894 - RNA, 19 nt, Artificial Sequence
  Description of Artificial Sequence: Synthetic oligonucleotide
uucaacguuagaguuuaac

SEQ ID NO: 1895 - RNA, 19 nt, Artificial Sequence
  Description of Artificial Sequence: Synthetic oligonucleotide
ucaacguuagaguuuaaca

SEQ ID NO: 1896 - RNA, 19 nt, Artificial Sequence
  Description of Artificial Sequence: Synthetic oligonucleotide
caacguuagaguuuaacaa

SEQ ID NO: 1897 - RNA, 19 nt, Artificial Sequence
  Description of Artificial Sequence: Synthetic oligonucleotide
aacguuagaguuuaacaaa

SEQ ID NO: 1898 - RNA, 19 nt, Artificial Sequence
  Description of Artificial Sequence: Synthetic oligonucleotide
acguuagaguuuaacaaaa

SEQ ID NO: 1899 - RNA, 19 nt, Artificial Sequence
  Description of Artificial Sequence: Synthetic oligonucleotide
cguuagaguuuaacaaaau

SEQ ID NO: 1900 - RNA, 19 nt, Artificial Sequence
  Description of Artificial Sequence: Synthetic oligonucleotide
guuagaguuuaacaaaaua

SEQ ID NO: 1901 - RNA, 19 nt, Artificial Sequence
  Description of Artificial Sequence: Synthetic oligonucleotide
uuagaguuuaacaaaauac

SEQ ID NO: 1902 - RNA, 19 nt, Artificial Sequence
  Description of Artificial Sequence: Synthetic oligonucleotide
uagaguuuaacaaaauacu

SEQ ID NO: 1903 - RNA, 19 nt, Artificial Sequence
  Description of Artificial Sequence: Synthetic oligonucleotide
agaguuuaacaaaauacuc

SEQ ID NO: 1904 - RNA, 19 nt, Artificial Sequence
  Description of Artificial Sequence: Synthetic oligonucleotide
gaguuuaacaaaauacucc

SEQ ID NO: 1905 - RNA, 19 nt, Artificial Sequence
  Description of Artificial Sequence: Synthetic oligonucleotide
aguuuaacaaaauacuccu

SEQ ID NO: 1906 - RNA, 19 nt, Artificial Sequence
  Description of Artificial Sequence: Synthetic oligonucleotide
guuuaacaaaauacuccua

SEQ ID NO: 1907 - RNA, 19 nt, Artificial Sequence
  Description of Artificial Sequence: Synthetic oligonucleotide
uuuaacaaaauacuccuag

SEQ ID NO: 1908 - RNA, 19 nt, Artificial Sequence
  Description of Artificial Sequence: Synthetic oligonucleotide
uuaacaaaauacuccuaga

SEQ ID NO: 1909 - RNA, 19 nt, Artificial Sequence
  Description of Artificial Sequence: Synthetic oligonucleotide
uaacaaaauacuccuagaa

SEQ ID NO: 1910 - RNA, 19 nt, Artificial Sequence
  Description of Artificial Sequence: Synthetic oligonucleotide
aacaaaauacuccuagaau

SEQ ID NO: 1911 - RNA, 19 nt, Artificial Sequence
  Description of Artificial Sequence: Synthetic oligonucleotide
acaaaauacuccuagaaua

SEQ ID NO: 1912 - RNA, 19 nt, Artificial Sequence
  Description of Artificial Sequence: Synthetic oligonucleotide
caaaauacuccuagaauaa

SEQ ID NO: 1913 - RNA, 19 nt, Artificial Sequence
  Description of Artificial Sequence: Synthetic oligonucleotide
aaaauacuccuagaauaac

SEQ ID NO: 1914 - RNA, 19 nt, Artificial Sequence
  Description of Artificial Sequence: Synthetic oligonucleotide
aaauacuccuagaauaacu

SEQ ID NO: 1915 - RNA, 19 nt, Artificial Sequence
  Description of Artificial Sequence: Synthetic oligonucleotide
aauacuccuagaauaacuu

SEQ ID NO: 1916 - RNA, 19 nt, Artificial Sequence
  Description of Artificial Sequence: Synthetic oligonucleotide
auacuccuagaauaacuug

SEQ ID NO: 1917 - RNA, 19 nt, Artificial Sequence
  Description of Artificial Sequence: Synthetic oligonucleotide
uacuccuagaauaacuugu

SEQ ID NO: 1918 - RNA, 19 nt, Artificial Sequence
  Description of Artificial Sequence: Synthetic oligonucleotide
acuccuagaauaacuuguu

SEQ ID NO: 1919 - RNA, 19 nt, Artificial Sequence
  Description of Artificial Sequence: Synthetic oligonucleotide
cuccuagaauaacuuguua

SEQ ID NO: 1920 - RNA, 19 nt, Artificial Sequence
  Description of Artificial Sequence: Synthetic oligonucleotide
uccuagaauaacuuguuau

SEQ ID NO: 1921 - RNA, 19 nt, Artificial Sequence
  Description of Artificial Sequence: Synthetic oligonucleotide
ccuagaauaacuuguuaua

SEQ ID NO: 1922 - RNA, 19 nt, Artificial Sequence
  Description of Artificial Sequence: Synthetic oligonucleotide
cuagaauaacuuguuauac

SEQ ID NO: 1923 - RNA, 19 nt, Artificial Sequence
  Description of Artificial Sequence: Synthetic oligonucleotide
uagaauaacuuguuauaca

SEQ ID NO: 1924 - RNA, 19 nt, Artificial Sequence
  Description of Artificial Sequence: Synthetic oligonucleotide
agaauaacuuguuauacaa

SEQ ID NO: 1925 - RNA, 19 nt, Artificial Sequence
  Description of Artificial Sequence: Synthetic oligonucleotide
gaauaacuuguuauacaau

SEQ ID NO: 1926 - RNA, 19 nt, Artificial Sequence
  Description of Artificial Sequence: Synthetic oligonucleotide
aauaacuuguuauacaaua

SEQ ID NO: 1927 - RNA, 19 nt, Artificial Sequence
  Description of Artificial Sequence: Synthetic oligonucleotide
auaacuuguuauacaauag

SEQ ID NO: 1928 - RNA, 19 nt, Artificial Sequence
  Description of Artificial Sequence: Synthetic oligonucleotide
uaacuuguuauacaauagg

SEQ ID NO: 1929 - RNA, 19 nt, Artificial Sequence
  Description of Artificial Sequence: Synthetic oligonucleotide
aacuuguuauacaauaggu

SEQ ID NO: 1930 - RNA, 19 nt, Artificial Sequence
  Description of Artificial Sequence: Synthetic oligonucleotide
acuuguuauacaauagguu

SEQ ID NO: 1931 - RNA, 19 nt, Artificial Sequence
  Description of Artificial Sequence: Synthetic oligonucleotide
cuuguuauacaauagguuc

SEQ ID NO: 1932 - RNA, 19 nt, Artificial Sequence
  Description of Artificial Sequence: Synthetic oligonucleotide
uuguuauacaauagguucu

SEQ ID NO: 1933 - RNA, 19 nt, Artificial Sequence
  Description of Artificial Sequence: Synthetic oligonucleotide
uguuauacaauagguucua

SEQ ID NO: 1934 - RNA, 19 nt, Artificial Sequence
  Description of Artificial Sequence: Synthetic oligonucleotide
guuauacaauagguucuaa

SEQ ID NO: 1935 - RNA, 19 nt, Artificial Sequence
  Description of Artificial Sequence: Synthetic oligonucleotide
uuauacaauagguucuaaa

SEQ ID NO: 1936 - RNA, 19 nt, Artificial Sequence
  Description of Artificial Sequence: Synthetic oligonucleotide
uauacaauagguucuaaaa

SEQ ID NO: 1937 - RNA, 19 nt, Artificial Sequence
  Description of Artificial Sequence: Synthetic oligonucleotide
auacaauagguucuaaaaa

SEQ ID NO: 1938 - RNA, 19 nt, Artificial Sequence
  Description of Artificial Sequence: Synthetic oligonucleotide
uacaauagguucuaaaaau

SEQ ID NO: 1939 - RNA, 19 nt, Artificial Sequence
  Description of Artificial Sequence: Synthetic oligonucleotide
acaauagguucuaaaaaua

SEQ ID NO: 1940 - RNA, 19 nt, Artificial Sequence
  Description of Artificial Sequence: Synthetic oligonucleotide
caauagguucuaaaaauaa

SEQ ID NO: 1941 - RNA, 19 nt, Artificial Sequence
  Description of Artificial Sequence: Synthetic oligonucleotide
aauagguucuaaaaauaaa

SEQ ID NO: 1942 - RNA, 19 nt, Artificial Sequence
  Description of Artificial Sequence: Synthetic oligonucleotide
auagguucuaaaaauaaaa

SEQ ID NO: 1943 - RNA, 19 nt, Artificial Sequence
  Description of Artificial Sequence: Synthetic oligonucleotide
uagguucuaaaaauaaaau

SEQ ID NO: 1944 - RNA, 19 nt, Artificial Sequence
  Description of Artificial Sequence: Synthetic oligonucleotide
agguucuaaaaauaaaauu

SEQ ID NO: 1945 - RNA, 19 nt, Artificial Sequence
  Description of Artificial Sequence: Synthetic oligonucleotide
gguucuaaaaauaaaauug

SEQ ID NO: 1946 - RNA, 19 nt, Artificial Sequence
  Description of Artificial Sequence: Synthetic oligonucleotide
guucuaaaaauaaaauugc

SEQ ID NO: 1947 - RNA, 19 nt, Artificial Sequence
  Description of Artificial Sequence: Synthetic oligonucleotide
uucuaaaaauaaaauugcu

SEQ ID NO: 1948 - RNA, 19 nt, Artificial Sequence
  Description of Artificial Sequence: Synthetic oligonucleotide
ucuaaaaauaaaauugcua

SEQ ID NO: 1949 - RNA, 19 nt, Artificial Sequence
  Description of Artificial Sequence: Synthetic oligonucleotide
cuaaaaauaaaauugcuaa

SEQ ID NO: 1950 - RNA, 19 nt, Artificial Sequence
  Description of Artificial Sequence: Synthetic oligonucleotide
uaaaaauaaaauugcuaaa

SEQ ID NO: 1951 - RNA, 19 nt, Artificial Sequence
  Description of Artificial Sequence: Synthetic oligonucleotide
aaaaauaaaauugcuaaac

SEQ ID NO: 1952 - RNA, 19 nt, Artificial Sequence
  Description of Artificial Sequence: Synthetic oligonucleotide
aaaauaaaauugcuaaaca

SEQ ID NO: 1953 - RNA, 19 nt, Artificial Sequence
  Description of Artificial Sequence: Synthetic oligonucleotide
aaauaaaauugcuaaacaa

SEQ ID NO: 1954 - RNA, 19 nt, Artificial Sequence
  Description of Artificial Sequence: Synthetic oligonucleotide
aauaaaauugcuaaacaag

SEQ ID NO: 1955 - RNA, 19 nt, Artificial Sequence
  Description of Artificial Sequence: Synthetic oligonucleotide
auaaaauugcuaaacaaga

SEQ ID NO: 1956 - RNA, 19 nt, Artificial Sequence
  Description of Artificial Sequence: Synthetic oligonucleotide
uaaaauugcuaaacaagaa

SEQ ID NO: 1957 - RNA, 19 nt, Artificial Sequence
  Description of Artificial Sequence: Synthetic oligonucleotide
aaaauugcuaaacaagaaa

SEQ ID NO: 1958 - RNA, 19 nt, Artificial Sequence
  Description of Artificial Sequence: Synthetic oligonucleotide
aaauugcuaaacaagaaau

SEQ ID NO: 1959 - RNA, 19 nt, Artificial Sequence
  Description of Artificial Sequence: Synthetic oligonucleotide
aauugcuaaacaagaaaug

SEQ ID NO: 1960 - RNA, 19 nt, Artificial Sequence
  Description of Artificial Sequence: Synthetic oligonucleotide
auugcuaaacaagaaauga

SEQ ID NO: 1961 - RNA, 19 nt, Artificial Sequence
  Description of Artificial Sequence: Synthetic oligonucleotide
uugcuaaacaagaaaugaa

SEQ ID NO: 1962 - RNA, 19 nt, Artificial Sequence
  Description of Artificial Sequence: Synthetic oligonucleotide
ugcuaaacaagaaaugaaa

SEQ ID NO: 1963 - RNA, 19 nt, Artificial Sequence
  Description of Artificial Sequence: Synthetic oligonucleotide
gcuaaacaagaaaugaaaa

SEQ ID NO: 1964 - RNA, 19 nt, Artificial Sequence
  Description of Artificial Sequence: Synthetic oligonucleotide
cuaaacaagaaaugaaaac

SEQ ID NO: 1965 - RNA, 19 nt, Artificial Sequence
  Description of Artificial Sequence: Synthetic oligonucleotide
uaaacaagaaaugaaaaca

SEQ ID NO: 1966 - RNA, 19 nt, Artificial Sequence
  Description of Artificial Sequence: Synthetic oligonucleotide
aaacaagaaaugaaaacau

SEQ ID NO: 1967 - RNA, 19 nt, Artificial Sequence
  Description of Artificial Sequence: Synthetic oligonucleotide
aacaagaaaugaaaacaug

SEQ ID NO: 1968 - RNA, 19 nt, Artificial Sequence
  Description of Artificial Sequence: Synthetic oligonucleotide
acaagaaaugaaaacaugg

SEQ ID NO: 1969 - RNA, 19 nt, Artificial Sequence
  Description of Artificial Sequence: Synthetic oligonucleotide
caagaaaugaaaacaugga

SEQ ID NO: 1970 - RNA, 19 nt, Artificial Sequence
  Description of Artificial Sequence: Synthetic oligonucleotide
aagaaaugaaaacauggag

SEQ ID NO: 1971 - RNA, 19 nt, Artificial Sequence
  Description of Artificial Sequence: Synthetic oligonucleotide
agaaaugaaaacauggagc

SEQ ID NO: 1972 - RNA, 19 nt, Artificial Sequence
  Description of Artificial Sequence: Synthetic oligonucleotide
gaaaugaaaacauggagca

SEQ ID NO: 1973 - RNA, 19 nt, Artificial Sequence
  Description of Artificial Sequence: Synthetic oligonucleotide
aaaugaaaacauggagcau

SEQ ID NO: 1974 - RNA, 19 nt, Artificial Sequence
  Description of Artificial Sequence: Synthetic oligonucleotide
aaugaaaacauggagcauu

SEQ ID NO: 1975 - RNA, 19 nt, Artificial Sequence
  Description of Artificial Sequence: Synthetic oligonucleotide
augaaaacauggagcauug

SEQ ID NO: 1976 - RNA, 19 nt, Artificial Sequence
  Description of Artificial Sequence: Synthetic oligonucleotide
ugaaaacauggagcauugu

SEQ ID NO: 1977 - RNA, 19 nt, Artificial Sequence
  Description of Artificial Sequence: Synthetic oligonucleotide
gaaaacauggagcauuguu

SEQ ID NO: 1978 - RNA, 19 nt, Artificial Sequence
  Description of Artificial Sequence: Synthetic oligonucleotide
aaaacauggagcauuguua

SEQ ID NO: 1979 - RNA, 19 nt, Artificial Sequence
  Description of Artificial Sequence: Synthetic oligonucleotide
aaacauggagcauuguuaa

SEQ ID NO: 1980 - RNA, 19 nt, Artificial Sequence
  Description of Artificial Sequence: Synthetic oligonucleotide
aacauggagcauuguuaau

SEQ ID NO: 1981 - RNA, 19 nt, Artificial Sequence
  Description of Artificial Sequence: Synthetic oligonucleotide
acauggagcauuguuaauu

SEQ ID NO: 1982 - RNA, 19 nt, Artificial Sequence
  Description of Artificial Sequence: Synthetic oligonucleotide
cauggagcauuguuaauuu

SEQ ID NO: 1983 - RNA, 19 nt, Artificial Sequence
  Description of Artificial Sequence: Synthetic oligonucleotide
auggagcauuguuaauuua

SEQ ID NO: 1984 - RNA, 19 nt, Artificial Sequence
  Description of Artificial Sequence: Synthetic oligonucleotide
uggagcauuguuaauuuac

SEQ ID NO: 1985 - RNA, 19 nt, Artificial Sequence
  Description of Artificial Sequence: Synthetic oligonucleotide
ggagcauuguuaauuuaca

SEQ ID NO: 1986 - RNA, 19 nt, Artificial Sequence
  Description of Artificial Sequence: Synthetic oligonucleotide
gagcauuguuaauuuacaa

SEQ ID NO: 1987 - RNA, 19 nt, Artificial Sequence
  Description of Artificial Sequence: Synthetic oligonucleotide
agcauuguuaauuuacaac

SEQ ID NO: 1988 - RNA, 19 nt, Artificial Sequence
  Description of Artificial Sequence: Synthetic oligonucleotide
gcauuguuaauuuacaaca

SEQ ID NO: 1989 - RNA, 19 nt, Artificial Sequence
  Description of Artificial Sequence: Synthetic oligonucleotide
cauuguuaauuuacaacag

SEQ ID NO: 1990 - RNA, 19 nt, Artificial Sequence
  Description of Artificial Sequence: Synthetic oligonucleotide
auuguuaauuuacaacaga

SEQ ID NO: 1991 - RNA, 19 nt, Artificial Sequence
  Description of Artificial Sequence: Synthetic oligonucleotide
uuguuaauuuacaacagaa

SEQ ID NO: 1992 - RNA, 19 nt, Artificial Sequence
  Description of Artificial Sequence: Synthetic oligonucleotide
uguuaauuuacaacagaaa

SEQ ID NO: 1993 - RNA, 19 nt, Artificial Sequence
  Description of Artificial Sequence: Synthetic oligonucleotide
guuaauuuacaacagaaaa

SEQ ID NO: 1994 - RNA, 19 nt, Artificial Sequence
  Description of Artificial Sequence: Synthetic oligonucleotide
uuaauuuacaacagaaaau

SEQ ID NO: 1995 - RNA, 19 nt, Artificial Sequence
  Description of Artificial Sequence: Synthetic oligonucleotide
uaauuuacaacagaaaauu

SEQ ID NO: 1996 - RNA, 19 nt, Artificial Sequence
  Description of Artificial Sequence: Synthetic oligonucleotide
aauuuacaacagaaaauua

SEQ ID NO: 1997 - RNA, 19 nt, Artificial Sequence
  Description of Artificial Sequence: Synthetic oligonucleotide
auuuacaacagaaaauuac

SEQ ID NO: 1998 - RNA, 19 nt, Artificial Sequence
  Description of Artificial Sequence: Synthetic oligonucleotide
uuuacaacagaaaauuacc

SEQ ID NO: 1999 - RNA, 19 nt, Artificial Sequence
  Description of Artificial Sequence: Synthetic oligonucleotide
uuacaacagaaaauuaccu

SEQ ID NO: 2000 - RNA, 19 nt, Artificial Sequence
  Description of Artificial Sequence: Synthetic oligonucleotide
uacaacagaaaauuaccuu

SEQ ID NO: 2001 - RNA, 19 nt, Artificial Sequence
  Description of Artificial Sequence: Synthetic oligonucleotide
acaacagaaaauuaccuuu

SEQ ID NO: 2002 - RNA, 19 nt, Artificial Sequence
  Description of Artificial Sequence: Synthetic oligonucleotide
caacagaaaauuaccuuuu

SEQ ID NO: 2003 - RNA, 19 nt, Artificial Sequence
  Description of Artificial Sequence: Synthetic oligonucleotide
aacagaaaauuaccuuuug

SEQ ID NO: 2004 - RNA, 19 nt, Artificial Sequence
  Description of Artificial Sequence: Synthetic oligonucleotide
acagaaaauuaccuuuuga

SEQ ID NO: 2005 - RNA, 19 nt, Artificial Sequence
  Description of Artificial Sequence: Synthetic oligonucleotide
cagaaaauuaccuuuugau

SEQ ID NO: 2006 - RNA, 19 nt, Artificial Sequence
  Description of Artificial Sequence: Synthetic oligonucleotide
agaaaauuaccuuuugauu

SEQ ID NO: 2007 - RNA, 19 nt, Artificial Sequence
  Description of Artificial Sequence: Synthetic oligonucleotide
gaaaauuaccuuuugauuu

SEQ ID NO: 2008 - RNA, 19 nt, Artificial Sequence
  Description of Artificial Sequence: Synthetic oligonucleotide
aaaauuaccuuuugauuug

SEQ ID NO: 2009 - RNA, 19 nt, Artificial Sequence
  Description of Artificial Sequence: Synthetic oligonucleotide
aaauuaccuuuugauuugu

SEQ ID NO: 2010 - RNA, 19 nt, Artificial Sequence
  Description of Artificial Sequence: Synthetic oligonucleotide
aauuaccuuuugauuugua

SEQ ID NO: 2011 - RNA, 19 nt, Artificial Sequence
  Description of Artificial Sequence: Synthetic oligonucleotide
auuaccuuuugauuuguaa

SEQ ID NO: 2012 - RNA, 19 nt, Artificial Sequence
  Description of Artificial Sequence: Synthetic oligonucleotide
uuaccuuuugauuuguaac

SEQ ID NO: 2013 - RNA, 19 nt, Artificial Sequence
  Description of Artificial Sequence: Synthetic oligonucleotide
uaccuuuugauuuguaaca

SEQ ID NO: 2014 - RNA, 19 nt, Artificial Sequence
  Description of Artificial Sequence: Synthetic oligonucleotide
accuuuugauuuguaacac

SEQ ID NO: 2015 - RNA, 19 nt, Artificial Sequence
  Description of Artificial Sequence: Synthetic oligonucleotide
ccuuuugauuuguaacacu

SEQ ID NO: 2016 - RNA, 19 nt, Artificial Sequence
  Description of Artificial Sequence: Synthetic oligonucleotide
cuuuugauuuguaacacua

SEQ ID NO: 2017 - RNA, 19 nt, Artificial Sequence
  Description of Artificial Sequence: Synthetic oligonucleotide
uuuugauuuguaacacuac

SEQ ID NO: 2018 - RNA, 19 nt, Artificial Sequence
  Description of Artificial Sequence: Synthetic oligonucleotide
uuugauuuguaacacuacu

SEQ ID NO: 2019 - RNA, 19 nt, Artificial Sequence
  Description of Artificial Sequence: Synthetic oligonucleotide
uugauuuguaacacuacuu

SEQ ID NO: 2020 - RNA, 19 nt, Artificial Sequence
  Description of Artificial Sequence: Synthetic oligonucleotide
ugauuuguaacacuacuuc

SEQ ID NO: 2021 - RNA, 19 nt, Artificial Sequence
  Description of Artificial Sequence: Synthetic oligonucleotide
gauuuguaacacuacuucu

SEQ ID NO: 2022 - RNA, 19 nt, Artificial Sequence
  Description of Artificial Sequence: Synthetic oligonucleotide
auuuguaacacuacuucug

SEQ ID NO: 2023 - RNA, 19 nt, Artificial Sequence
  Description of Artificial Sequence: Synthetic oligonucleotide
uuuguaacacuacuucugc

SEQ ID NO: 2024 - RNA, 19 nt, Artificial Sequence
  Description of Artificial Sequence: Synthetic oligonucleotide
uuguaacacuacuucugcu

SEQ ID NO: 2025 - RNA, 19 nt, Artificial Sequence
  Description of Artificial Sequence: Synthetic oligonucleotide
uguaacacuacuucugcug

SEQ ID NO: 2026 - RNA, 19 nt, Artificial Sequence
  Description of Artificial Sequence: Synthetic oligonucleotide
guaacacuacuucugcugu

SEQ ID NO: 2027 - RNA, 19 nt, Artificial Sequence
  Description of Artificial Sequence: Synthetic oligonucleotide
uaacacuacuucugcuguu

SEQ ID NO: 2028 - RNA, 19 nt, Artificial Sequence
  Description of Artificial Sequence: Synthetic oligonucleotide
aacacuacuucugcuguuc

SEQ ID NO: 2029 - RNA, 19 nt, Artificial Sequence
  Description of Artificial Sequence: Synthetic oligonucleotide
acacuacuucugcuguuca

SEQ ID NO: 2030 - RNA, 19 nt, Artificial Sequence
  Description of Artificial Sequence: Synthetic oligonucleotide
cacuacuucugcuguucaa

SEQ ID NO: 2031 - RNA, 19 nt, Artificial Sequence
  Description of Artificial Sequence: Synthetic oligonucleotide
acuacuucugcuguucaau

SEQ ID NO: 2032 - RNA, 19 nt, Artificial Sequence
  Description of Artificial Sequence: Synthetic oligonucleotide
cuacuucugcuguucaauc

SEQ ID NO: 2033 - RNA, 19 nt, Artificial Sequence
  Description of Artificial Sequence: Synthetic oligonucleotide
uacuucugcuguucaauca

SEQ ID NO: 2034 - RNA, 19 nt, Artificial Sequence
  Description of Artificial Sequence: Synthetic oligonucleotide
acuucugcuguucaaucaa

SEQ ID NO: 2035 - RNA, 19 nt, Artificial Sequence
  Description of Artificial Sequence: Synthetic oligonucleotide
cuucugcuguucaaucaag

SEQ ID NO: 2036 - RNA, 19 nt, Artificial Sequence
  Description of Artificial Sequence: Synthetic oligonucleotide
uucugcuguucaaucaaga

SEQ ID NO: 2037 - RNA, 19 nt, Artificial Sequence
  Description of Artificial Sequence: Synthetic oligonucleotide
ucugcuguucaaucaagag

SEQ ID NO: 2038 - RNA, 19 nt, Artificial Sequence
  Description of Artificial Sequence: Synthetic oligonucleotide
cugcuguucaaucaagagu

SEQ ID NO: 2039 - RNA, 19 nt, Artificial Sequence
  Description of Artificial Sequence: Synthetic oligonucleotide
ugcuguucaaucaagaguc

SEQ ID NO: 2040 - RNA, 19 nt, Artificial Sequence
  Description of Artificial Sequence: Synthetic oligonucleotide
gcuguucaaucaagagucu

SEQ ID NO: 2041 - RNA, 19 nt, Artificial Sequence
  Description of Artificial Sequence: Synthetic oligonucleotide
cuguucaaucaagagucuu

SEQ ID NO: 2042 - RNA, 19 nt, Artificial Sequence
  Description of Artificial Sequence: Synthetic oligonucleotide
uguucaaucaagagucuug

SEQ ID NO: 2043 - RNA, 19 nt, Artificial Sequence
  Description of Artificial Sequence: Synthetic oligonucleotide
guucaaucaagagucuugg

SEQ ID NO: 2044 - RNA, 19 nt, Artificial Sequence
  Description of Artificial Sequence: Synthetic oligonucleotide
uucaaucaagagucuuggu

SEQ ID NO: 2045 - RNA, 19 nt, Artificial Sequence
  Description of Artificial Sequence: Synthetic oligonucleotide
ucaaucaagagucuuggua

SEQ ID NO: 2046 - RNA, 19 nt, Artificial Sequence
  Description of Artificial Sequence: Synthetic oligonucleotide
caaucaagagucuugguag

SEQ ID NO: 2047 - RNA, 19 nt, Artificial Sequence
  Description of Artificial Sequence: Synthetic oligonucleotide
aaucaagagucuugguaga

SEQ ID NO: 2048 - RNA, 19 nt, Artificial Sequence
  Description of Artificial Sequence: Synthetic oligonucleotide
aucaagagucuugguagau

SEQ ID NO: 2049 - RNA, 19 nt, Artificial Sequence
  Description of Artificial Sequence: Synthetic oligonucleotide
ucaagagucuugguagaua

SEQ ID NO: 2050 - RNA, 19 nt, Artificial Sequence
  Description of Artificial Sequence: Synthetic oligonucleotide
caagagucuugguagauaa

SEQ ID NO: 2051 - RNA, 19 nt, Artificial Sequence
  Description of Artificial Sequence: Synthetic oligonucleotide
aagagucuugguagauaag

SEQ ID NO: 2052 - RNA, 19 nt, Artificial Sequence
  Description of Artificial Sequence: Synthetic oligonucleotide
agagucuugguagauaaga

SEQ ID NO: 2053 - RNA, 19 nt, Artificial Sequence
  Description of Artificial Sequence: Synthetic oligonucleotide
gagucuugguagauaagaa

SEQ ID NO: 2054 - RNA, 19 nt, Artificial Sequence
  Description of Artificial Sequence: Synthetic oligonucleotide
agucuugguagauaagaaa

SEQ ID NO: 2055 - RNA, 19 nt, Artificial Sequence
  Description of Artificial Sequence: Synthetic oligonucleotide
gucuugguagauaagaaaa

SEQ ID NO: 2056 - RNA, 19 nt, Artificial Sequence
  Description of Artificial Sequence: Synthetic oligonucleotide
ucuugguagauaagaaaaa

SEQ ID NO: 2057 - RNA, 19 nt, Artificial Sequence
  Description of Artificial Sequence: Synthetic oligonucleotide
cuugguagauaagaaaaaa

SEQ ID NO: 2058 - RNA, 19 nt, Artificial Sequence
  Description of Artificial Sequence: Synthetic oligonucleotide
uugguagauaagaaaaaaa

SEQ ID NO: 2059 - RNA, 19 nt, Artificial Sequence
  Description of Artificial Sequence: Synthetic oligonucleotide
ugguagauaagaaaaaaau

SEQ ID NO: 2060 - RNA, 19 nt, Artificial Sequence
  Description of Artificial Sequence: Synthetic oligonucleotide
gguagauaagaaaaaaauc

SEQ ID NO: 2061 - RNA, 19 nt, Artificial Sequence
  Description of Artificial Sequence: Synthetic oligonucleotide
guagauaagaaaaaaauca

SEQ ID NO: 2062 - RNA, 19 nt, Artificial Sequence
  Description of Artificial Sequence: Synthetic oligonucleotide
uagauaagaaaaaaaucag

SEQ ID NO: 2063 - RNA, 19 nt, Artificial Sequence
  Description of Artificial Sequence: Synthetic oligonucleotide
agauaagaaaaaaaucagu

SEQ ID NO: 2064 - RNA, 19 nt, Artificial Sequence
  Description of Artificial Sequence: Synthetic oligonucleotide
gauaagaaaaaaaucaguc

SEQ ID NO: 2065 - RNA, 19 nt, Artificial Sequence
  Description of Artificial Sequence: Synthetic oligonucleotide
auaagaaaaaaaucaguca

SEQ ID NO: 2066 - RNA, 19 nt, Artificial Sequence
  Description of Artificial Sequence: Synthetic oligonucleotide
uaagaaaaaaaucagucaa

SEQ ID NO: 2067 - RNA, 19 nt, Artificial Sequence
  Description of Artificial Sequence: Synthetic oligonucleotide
aagaaaaaaaucagucaau

SEQ ID NO: 2068 - RNA, 19 nt, Artificial Sequence
  Description of Artificial Sequence: Synthetic oligonucleotide
agaaaaaaaucagucaaua

SEQ ID NO: 2069 - RNA, 19 nt, Artificial Sequence
  Description of Artificial Sequence: Synthetic oligonucleotide
gaaaaaaaucagucaauau

SEQ ID NO: 2070 - RNA, 19 nt, Artificial Sequence
  Description of Artificial Sequence: Synthetic oligonucleotide
aaaaaaaucagucaauauu

SEQ ID NO: 2071 - RNA, 19 nt, Artificial Sequence
  Description of Artificial Sequence: Synthetic oligonucleotide
aaaaaaucagucaauauuu

SEQ ID NO: 2072 - RNA, 19 nt, Artificial Sequence
  Description of Artificial Sequence: Synthetic oligonucleotide
aaaaaucagucaauauuuc

SEQ ID NO: 2073 - RNA, 19 nt, Artificial Sequence
  Description of Artificial Sequence: Synthetic oligonucleotide
aaaaucagucaauauuucc

SEQ ID NO: 2074 - RNA, 19 nt, Artificial Sequence
  Description of Artificial Sequence: Synthetic oligonucleotide
aaaucagucaauauuucca

SEQ ID NO: 2075 - RNA, 19 nt, Artificial Sequence
  Description of Artificial Sequence: Synthetic oligonucleotide
aaucagucaauauuuccaa

SEQ ID NO: 2076 - RNA, 19 nt, Artificial Sequence
  Description of Artificial Sequence: Synthetic oligonucleotide
aucagucaauauuuccaaa

SEQ ID NO: 2077 - RNA, 19 nt, Artificial Sequence
  Description of Artificial Sequence: Synthetic oligonucleotide
ucagucaauauuuccaaau

SEQ ID NO: 2078 - RNA, 19 nt, Artificial Sequence
  Description of Artificial Sequence: Synthetic oligonucleotide
cagucaauauuuccaaaua

SEQ ID NO: 2079 - RNA, 19 nt, Artificial Sequence
  Description of Artificial Sequence: Synthetic oligonucleotide
agucaauauuuccaaauaa

SEQ ID NO: 2080 - RNA, 19 nt, Artificial Sequence
  Description of Artificial Sequence: Synthetic oligonucleotide
gucaauauuuccaaauaau

SEQ ID NO: 2081 - RNA, 19 nt, Artificial Sequence
  Description of Artificial Sequence: Synthetic oligonucleotide
ucaauauuuccaaauaauu

SEQ ID NO: 2082 - RNA, 19 nt, Artificial Sequence
  Description of Artificial Sequence: Synthetic oligonucleotide
caauauuuccaaauaauug

SEQ ID NO: 2083 - RNA, 19 nt, Artificial Sequence
  Description of Artificial Sequence: Synthetic oligonucleotide
aauauuuccaaauaauugc

SEQ ID NO: 2084 - RNA, 19 nt, Artificial Sequence
  Description of Artificial Sequence: Synthetic oligonucleotide
auauuuccaaauaauugca

SEQ ID NO: 2085 - RNA, 19 nt, Artificial Sequence
  Description of Artificial Sequence: Synthetic oligonucleotide
uauuuccaaauaauugcaa

SEQ ID NO: 2086 - RNA, 19 nt, Artificial Sequence
  Description of Artificial Sequence: Synthetic oligonucleotide
auuuccaaauaauugcaaa

SEQ ID NO: 2087 - RNA, 19 nt, Artificial Sequence
  Description of Artificial Sequence: Synthetic oligonucleotide
uuuccaaauaauugcaaaa

SEQ ID NO: 2088 - RNA, 19 nt, Artificial Sequence
  Description of Artificial Sequence: Synthetic oligonucleotide
uuccaaauaauugcaaaau

SEQ ID NO: 2089 - RNA, 19 nt, Artificial Sequence
  Description of Artificial Sequence: Synthetic oligonucleotide
uccaaauaauugcaaaaua

SEQ ID NO: 2090 - RNA, 19 nt, Artificial Sequence
  Description of Artificial Sequence: Synthetic oligonucleotide
ccaaauaauugcaaaauaa

SEQ ID NO: 2091 - RNA, 19 nt, Artificial Sequence
  Description of Artificial Sequence: Synthetic oligonucleotide
caaauaauugcaaaauaau

SEQ ID NO: 2092 - RNA, 19 nt, Artificial Sequence
  Description of Artificial Sequence: Synthetic oligonucleotide
aaauaauugcaaaauaaug

SEQ ID NO: 2093 - RNA, 19 nt, Artificial Sequence
  Description of Artificial Sequence: Synthetic oligonucleotide
aauaauugcaaaauaaugg

SEQ ID NO: 2094 - RNA, 19 nt, Artificial Sequence
  Description of Artificial Sequence: Synthetic oligonucleotide
auaauugcaaaauaauggc

SEQ ID NO: 2095 - RNA, 19 nt, Artificial Sequence
  Description of Artificial Sequence: Synthetic oligonucleotide
uaauugcaaaauaauggcc

SEQ ID NO: 2096 - RNA, 19 nt, Artificial Sequence
  Description of Artificial Sequence: Synthetic oligonucleotide
aauugcaaaauaauggcca

SEQ ID NO: 2097 - RNA, 19 nt, Artificial Sequence
  Description of Artificial Sequence: Synthetic oligonucleotide
auugcaaaauaauggccag

SEQ ID NO: 2098 - RNA, 19 nt, Artificial Sequence
  Description of Artificial Sequence: Synthetic oligonucleotide
uugcaaaauaauggccagu

SEQ ID NO: 2099 - RNA, 19 nt, Artificial Sequence
  Description of Artificial Sequence: Synthetic oligonucleotide
ugcaaaauaauggccaguu

SEQ ID NO: 2100 - RNA, 19 nt, Artificial Sequence
  Description of Artificial Sequence: Synthetic oligonucleotide
gcaaaauaauggccaguug

SEQ ID NO: 2101 - RNA, 19 nt, Artificial Sequence
  Description of Artificial Sequence: Synthetic oligonucleotide
caaaauaauggccaguugu

SEQ ID NO: 2102 - RNA, 19 nt, Artificial Sequence
  Description of Artificial Sequence: Synthetic oligonucleotide
aaaauaauggccaguuguu

SEQ ID NO: 2103 - RNA, 19 nt, Artificial Sequence
  Description of Artificial Sequence: Synthetic oligonucleotide
aaauaauggccaguuguuu

SEQ ID NO: 2104 - RNA, 19 nt, Artificial Sequence
  Description of Artificial Sequence: Synthetic oligonucleotide
aauaauggccaguuguuua

SEQ ID NO: 2105 - RNA, 19 nt, Artificial Sequence
  Description of Artificial Sequence: Synthetic oligonucleotide
auaauggccaguuguuuag

SEQ ID NO: 2106 - RNA, 19 nt, Artificial Sequence
  Description of Artificial Sequence: Synthetic oligonucleotide
uaauggccaguuguuuagg

SEQ ID NO: 2107 - RNA, 19 nt, Artificial Sequence
  Description of Artificial Sequence: Synthetic oligonucleotide
aauggccaguuguuuagga

SEQ ID NO: 2108 - RNA, 19 nt, Artificial Sequence
  Description of Artificial Sequence: Synthetic oligonucleotide
auggccaguuguuuaggaa

SEQ ID NO: 2109 - RNA, 19 nt, Artificial Sequence
  Description of Artificial Sequence: Synthetic oligonucleotide
uggccaguuguuuaggaag

SEQ ID NO: 2110 - RNA, 19 nt, Artificial Sequence
  Description of Artificial Sequence: Synthetic oligonucleotide
ggccaguuguuuaggaagg

SEQ ID NO: 2111 - RNA, 19 nt, Artificial Sequence
  Description of Artificial Sequence: Synthetic oligonucleotide
gccaguuguuuaggaaggc

SEQ ID NO: 2112 - RNA, 19 nt, Artificial Sequence
  Description of Artificial Sequence: Synthetic oligonucleotide
ccaguuguuuaggaaggcc

SEQ ID NO: 2113 - RNA, 19 nt, Artificial Sequence
  Description of Artificial Sequence: Synthetic oligonucleotide
caguuguuuaggaaggccu

SEQ ID NO: 2114 - RNA, 19 nt, Artificial Sequence
  Description of Artificial Sequence: Synthetic oligonucleotide
aguuguuuaggaaggccuu

SEQ ID NO: 2115 - RNA, 19 nt, Artificial Sequence
  Description of Artificial Sequence: Synthetic oligonucleotide
guuguuuaggaaggccuuu

SEQ ID NO: 2116 - RNA, 19 nt, Artificial Sequence
  Description of Artificial Sequence: Synthetic oligonucleotide
uuguuuaggaaggccuuua

SEQ ID NO: 2117 - RNA, 19 nt, Artificial Sequence
  Description of Artificial Sequence: Synthetic oligonucleotide
uguuuaggaaggccuuuag

SEQ ID NO: 2118 - RNA, 19 nt, Artificial Sequence
  Description of Artificial Sequence: Synthetic oligonucleotide
guuuaggaaggccuuuagg

SEQ ID NO: 2119 - RNA, 19 nt, Artificial Sequence
  Description of Artificial Sequence: Synthetic oligonucleotide
uuuaggaaggccuuuagga

SEQ ID NO: 2120 - RNA, 19 nt, Artificial Sequence
  Description of Artificial Sequence: Synthetic oligonucleotide
uuaggaaggccuuuaggaa

SEQ ID NO: 2121 - RNA, 19 nt, Artificial Sequence
  Description of Artificial Sequence: Synthetic oligonucleotide
uaggaaggccuuuaggaag

SEQ ID NO: 2122 - RNA, 19 nt, Artificial Sequence
  Description of Artificial Sequence: Synthetic oligonucleotide
aggaaggccuuuaggaaga

SEQ ID NO: 2123 - RNA, 19 nt, Artificial Sequence
  Description of Artificial Sequence: Synthetic oligonucleotide
ggaaggccuuuaggaagac

SEQ ID NO: 2124 - RNA, 19 nt, Artificial Sequence
  Description of Artificial Sequence: Synthetic oligonucleotide
gaaggccuuuaggaagaca

SEQ ID NO: 2125 - RNA, 19 nt, Artificial Sequence
  Description of Artificial Sequence: Synthetic oligonucleotide
aaggccuuuaggaagacaa

SEQ ID NO: 2126 - RNA, 19 nt, Artificial Sequence
  Description of Artificial Sequence: Synthetic oligonucleotide
aggccuuuaggaagacaaa

SEQ ID NO: 2127 - RNA, 19 nt, Artificial Sequence
  Description of Artificial Sequence: Synthetic oligonucleotide
ggccuuuaggaagacaaau

SEQ ID NO: 2128 - RNA, 19 nt, Artificial Sequence
  Description of Artificial Sequence: Synthetic oligonucleotide
gccuuuaggaagacaaaua

SEQ ID NO: 2129 - RNA, 19 nt, Artificial Sequence
  Description of Artificial Sequence: Synthetic oligonucleotide
ccuuuaggaagacaaauaa

SEQ ID NO: 2130 - RNA, 19 nt, Artificial Sequence
  Description of Artificial Sequence: Synthetic oligonucleotide
cuuuaggaagacaaauaaa

SEQ ID NO: 2131 - RNA, 19 nt, Artificial Sequence
  Description of Artificial Sequence: Synthetic oligonucleotide
uuuaggaagacaaauaaau

SEQ ID NO: 2132 - RNA, 19 nt, Artificial Sequence
  Description of Artificial Sequence: Synthetic oligonucleotide
uuaggaagacaaauaaaua

SEQ ID NO: 2133 - RNA, 19 nt, Artificial Sequence
  Description of Artificial Sequence: Synthetic oligonucleotide
uaggaagacaaauaaauaa

SEQ ID NO: 2134 - RNA, 19 nt, Artificial Sequence
  Description of Artificial Sequence: Synthetic oligonucleotide
aggaagacaaauaaauaac

SEQ ID NO: 2135 - RNA, 19 nt, Artificial Sequence
  Description of Artificial Sequence: Synthetic oligonucleotide
ggaagacaaauaaauaaca

SEQ ID NO: 2136 - RNA, 19 nt, Artificial Sequence
  Description of Artificial Sequence: Synthetic oligonucleotide
gaagacaaauaaauaacaa

SEQ ID NO: 2137 - RNA, 19 nt, Artificial Sequence
  Description of Artificial Sequence: Synthetic oligonucleotide
aagacaaauaaauaacaaa

SEQ ID NO: 2138 - RNA, 19 nt, Artificial Sequence
  Description of Artificial Sequence: Synthetic oligonucleotide
agacaaauaaauaacaaac

SEQ ID NO: 2139 - RNA, 19 nt, Artificial Sequence
  Description of Artificial Sequence: Synthetic oligonucleotide
gacaaauaaauaacaaaca

SEQ ID NO: 2140 - RNA, 19 nt, Artificial Sequence
  Description of Artificial Sequence: Synthetic oligonucleotide
acaaauaaauaacaaacaa

SEQ ID NO: 2141 - RNA, 19 nt, Artificial Sequence
  Description of Artificial Sequence: Synthetic oligonucleotide
caaauaaauaacaaacaaa

SEQ ID NO: 2142 - RNA, 19 nt, Artificial Sequence
  Description of Artificial Sequence: Synthetic oligonucleotide
aaauaaauaacaaacaaac

SEQ ID NO: 2143 - RNA, 19 nt, Artificial Sequence
  Description of Artificial Sequence: Synthetic oligonucleotide
aauaaauaacaaacaaaca

SEQ ID NO: 2144 - RNA, 19 nt, Artificial Sequence
  Description of Artificial Sequence: Synthetic oligonucleotide
auaaauaacaaacaaacag

SEQ ID NO: 2145 - RNA, 19 nt, Artificial Sequence
  Description of Artificial Sequence: Synthetic oligonucleotide
uaaauaacaaacaaacagc

SEQ ID NO: 2146 - RNA, 19 nt, Artificial Sequence
  Description of Artificial Sequence: Synthetic oligonucleotide
aaauaacaaacaaacagcc

SEQ ID NO: 2147 - RNA, 19 nt, Artificial Sequence
  Description of Artificial Sequence: Synthetic oligonucleotide
aauaacaaacaaacagcca

SEQ ID NO: 2148 - RNA, 19 nt, Artificial Sequence
  Description of Artificial Sequence: Synthetic oligonucleotide
auaacaaacaaacagccac

SEQ ID NO: 2149 - RNA, 19 nt, Artificial Sequence
  Description of Artificial Sequence: Synthetic oligonucleotide
uaacaaacaaacagccaca

SEQ ID NO: 2150 - RNA, 19 nt, Artificial Sequence
  Description of Artificial Sequence: Synthetic oligonucleotide
aacaaacaaacagccacaa

SEQ ID NO: 2151 - RNA, 19 nt, Artificial Sequence
  Description of Artificial Sequence: Synthetic oligonucleotide
acaaacaaacagccacaaa

SEQ ID NO: 2152 - RNA, 19 nt, Artificial Sequence
  Description of Artificial Sequence: Synthetic oligonucleotide
caaacaaacagccacaaau

SEQ ID NO: 2153 - RNA, 19 nt, Artificial Sequence
  Description of Artificial Sequence: Synthetic oligonucleotide
aaacaaacagccacaaaua

SEQ ID NO: 2154 - RNA, 19 nt, Artificial Sequence
  Description of Artificial Sequence: Synthetic oligonucleotide
aacaaacagccacaaauac

SEQ ID NO: 2155 - RNA, 19 nt, Artificial Sequence
  Description of Artificial Sequence: Synthetic oligonucleotide
acaaacagccacaaauacu

SEQ ID NO: 2156 - RNA, 19 nt, Artificial Sequence
  Description of Artificial Sequence: Synthetic oligonucleotide
caaacagccacaaauacuu

SEQ ID NO: 2157 - RNA, 19 nt, Artificial Sequence
  Description of Artificial Sequence: Synthetic oligonucleotide
aaacagccacaaauacuuu

SEQ ID NO: 2158 - RNA, 19 nt, Artificial Sequence
  Description of Artificial Sequence: Synthetic oligonucleotide
aacagccacaaauacuuuu

SEQ ID NO: 2159 - RNA, 19 nt, Artificial Sequence
  Description of Artificial Sequence: Synthetic oligonucleotide
acagccacaaauacuuuuu

SEQ ID NO: 2160 - RNA, 19 nt, Artificial Sequence
  Description of Artificial Sequence: Synthetic oligonucleotide
cagccacaaauacuuuuuu

SEQ ID NO: 2161 - RNA, 19 nt, Artificial Sequence
  Description of Artificial Sequence: Synthetic oligonucleotide
agccacaaauacuuuuuuu

SEQ ID NO: 2162 - RNA, 19 nt, Artificial Sequence
  Description of Artificial Sequence: Synthetic oligonucleotide
gccacaaauacuuuuuuuu

SEQ ID NO: 2163 - RNA, 19 nt, Artificial Sequence
  Description of Artificial Sequence: Synthetic oligonucleotide
ccacaaauacuuuuuuuuc

SEQ ID NO: 2164 - RNA, 19 nt, Artificial Sequence
  Description of Artificial Sequence: Synthetic oligonucleotide
cacaaauacuuuuuuuuca

SEQ ID NO: 2165 - RNA, 19 nt, Artificial Sequence
  Description of Artificial Sequence: Synthetic oligonucleotide
acaaauacuuuuuuuucaa

SEQ ID NO: 2166 - RNA, 19 nt, Artificial Sequence
  Description of Artificial Sequence: Synthetic oligonucleotide
caaauacuuuuuuuucaaa

SEQ ID NO: 2167 - RNA, 19 nt, Artificial Sequence
  Description of Artificial Sequence: Synthetic oligonucleotide
aaauacuuuuuuuucaaaa

SEQ ID NO: 2168 - RNA, 19 nt, Artificial Sequence
  Description of Artificial Sequence: Synthetic oligonucleotide
aauacuuuuuuuucaaaau

SEQ ID NO: 2169 - RNA, 19 nt, Artificial Sequence
  Description of Artificial Sequence: Synthetic oligonucleotide
auacuuuuuuuucaaaauu

SEQ ID NO: 2170 - RNA, 19 nt, Artificial Sequence
  Description of Artificial Sequence: Synthetic oligonucleotide
uacuuuuuuuucaaaauuu

SEQ ID NO: 2171 - RNA, 19 nt, Artificial Sequence
  Description of Artificial Sequence: Synthetic oligonucleotide
acuuuuuuuucaaaauuuu

SEQ ID NO: 2172 - RNA, 19 nt, Artificial Sequence
  Description of Artificial Sequence: Synthetic oligonucleotide
cuuuuuuuucaaaauuuua

SEQ ID NO: 2173 - RNA, 19 nt, Artificial Sequence
  Description of Artificial Sequence: Synthetic oligonucleotide
uuuuuuuucaaaauuuuag

SEQ ID NO: 2174 - RNA, 19 nt, Artificial Sequence
  Description of Artificial Sequence: Synthetic oligonucleotide
uuuuuuucaaaauuuuagu

SEQ ID NO: 2175 - RNA, 19 nt, Artificial Sequence
  Description of Artificial Sequence: Synthetic oligonucleotide
uuuuuucaaaauuuuaguu

SEQ ID NO: 2176 - RNA, 19 nt, Artificial Sequence
  Description of Artificial Sequence: Synthetic oligonucleotide
uuuuucaaaauuuuaguuu

SEQ ID NO: 2177 - RNA, 19 nt, Artificial Sequence
  Description of Artificial Sequence: Synthetic oligonucleotide
uuuucaaaauuuuaguuuu

SEQ ID NO: 2178 - RNA, 19 nt, Artificial Sequence
  Description of Artificial Sequence: Synthetic oligonucleotide
uuucaaaauuuuaguuuua

SEQ ID NO: 2179 - RNA, 19 nt, Artificial Sequence
  Description of Artificial Sequence: Synthetic oligonucleotide
uucaaaauuuuaguuuuac

SEQ ID NO: 2180 - RNA, 19 nt, Artificial Sequence
  Description of Artificial Sequence: Synthetic oligonucleotide
ucaaaauuuuaguuuuacc

SEQ ID NO: 2181 - RNA, 19 nt, Artificial Sequence
  Description of Artificial Sequence: Synthetic oligonucleotide
caaaauuuuaguuuuaccu

SEQ ID NO: 2182 - RNA, 19 nt, Artificial Sequence
  Description of Artificial Sequence: Synthetic oligonucleotide
aaaauuuuaguuuuaccug

SEQ ID NO: 2183 - RNA, 19 nt, Artificial Sequence
  Description of Artificial Sequence: Synthetic oligonucleotide
aaauuuuaguuuuaccugu

SEQ ID NO: 2184 - RNA, 19 nt, Artificial Sequence
  Description of Artificial Sequence: Synthetic oligonucleotide
aauuuuaguuuuaccugua

SEQ ID NO: 2185 - RNA, 19 nt, Artificial Sequence
  Description of Artificial Sequence: Synthetic oligonucleotide
auuuuaguuuuaccuguaa

SEQ ID NO: 2186 - RNA, 19 nt, Artificial Sequence
  Description of Artificial Sequence: Synthetic oligonucleotide
uuuuaguuuuaccuguaau

SEQ ID NO: 2187 - RNA, 19 nt, Artificial Sequence
  Description of Artificial Sequence: Synthetic oligonucleotide
uuuaguuuuaccuguaauu

SEQ ID NO: 2188 - RNA, 19 nt, Artificial Sequence
  Description of Artificial Sequence: Synthetic oligonucleotide
uuaguuuuaccuguaauua

SEQ ID NO: 2189 - RNA, 19 nt, Artificial Sequence
  Description of Artificial Sequence: Synthetic oligonucleotide
uaguuuuaccuguaauuaa

SEQ ID NO: 2190 - RNA, 19 nt, Artificial Sequence
  Description of Artificial Sequence: Synthetic oligonucleotide
aguuuuaccuguaauuaau

SEQ ID NO: 2191 - RNA, 19 nt, Artificial Sequence
  Description of Artificial Sequence: Synthetic oligonucleotide
guuuuaccuguaauuaaua

SEQ ID NO: 2192 - RNA, 19 nt, Artificial Sequence
  Description of Artificial Sequence: Synthetic oligonucleotide
uuuuaccuguaauuaauaa

SEQ ID NO: 2193 - RNA, 19 nt, Artificial Sequence
  Description of Artificial Sequence: Synthetic oligonucleotide
uuuaccuguaauuaauaag

SEQ ID NO: 2194 - RNA, 19 nt, Artificial Sequence
  Description of Artificial Sequence: Synthetic oligonucleotide
uuaccuguaauuaauaaga

SEQ ID NO: 2195 - RNA, 19 nt, Artificial Sequence
  Description of Artificial Sequence: Synthetic oligonucleotide
uaccuguaauuaauaagaa

SEQ ID NO: 2196 - RNA, 19 nt, Artificial Sequence
  Description of Artificial Sequence: Synthetic oligonucleotide
accuguaauuaauaagaac

SEQ ID NO: 2197 - RNA, 19 nt, Artificial Sequence
  Description of Artificial Sequence: Synthetic oligonucleotide
ccuguaauuaauaagaacu

SEQ ID NO: 2198 - RNA, 19 nt, Artificial Sequence
  Description of Artificial Sequence: Synthetic oligonucleotide
cuguaauuaauaagaacug

SEQ ID NO: 2199 - RNA, 19 nt, Artificial Sequence
  Description of Artificial Sequence: Synthetic oligonucleotide
uguaauuaauaagaacuga

SEQ ID NO: 2200 - RNA, 19 nt, Artificial Sequence
  Description of Artificial Sequence: Synthetic oligonucleotide
guaauuaauaagaacugau

SEQ ID NO: 2201 - RNA, 19 nt, Artificial Sequence
  Description of Artificial Sequence: Synthetic oligonucleotide
uaauuaauaagaacugaua

SEQ ID NO: 2202 - RNA, 19 nt, Artificial Sequence
  Description of Artificial Sequence: Synthetic oligonucleotide
aauuaauaagaacugauac

SEQ ID NO: 2203 - RNA, 19 nt, Artificial Sequence
  Description of Artificial Sequence: Synthetic oligonucleotide
auuaauaagaacugauaca

SEQ ID NO: 2204 - RNA, 19 nt, Artificial Sequence
  Description of Artificial Sequence: Synthetic oligonucleotide
uuaauaagaacugauacaa

SEQ ID NO: 2205 - RNA, 19 nt, Artificial Sequence
  Description of Artificial Sequence: Synthetic oligonucleotide
uaauaagaacugauacaag

SEQ ID NO: 2206 - RNA, 19 nt, Artificial Sequence
  Description of Artificial Sequence: Synthetic oligonucleotide
aauaagaacugauacaaga

SEQ ID NO: 2207 - RNA, 19 nt, Artificial Sequence
  Description of Artificial Sequence: Synthetic oligonucleotide
auaagaacugauacaagac

SEQ ID NO: 2208 - RNA, 19 nt, Artificial Sequence
  Description of Artificial Sequence: Synthetic oligonucleotide
uaagaacugauacaagaca

SEQ ID NO: 2209 - RNA, 19 nt, Artificial Sequence
  Description of Artificial Sequence: Synthetic oligonucleotide
aagaacugauacaagacaa

SEQ ID NO: 2210 - RNA, 19 nt, Artificial Sequence
  Description of Artificial Sequence: Synthetic oligonucleotide
agaacugauacaagacaaa

SEQ ID NO: 2211 - RNA, 19 nt, Artificial Sequence
  Description of Artificial Sequence: Synthetic oligonucleotide
gaacugauacaagacaaaa

SEQ ID NO: 2212 - RNA, 19 nt, Artificial Sequence
  Description of Artificial Sequence: Synthetic oligonucleotide
aacugauacaagacaaaaa

SEQ ID NO: 2213 - RNA, 19 nt, Artificial Sequence
  Description of Artificial Sequence: Synthetic oligonucleotide
acugauacaagacaaaaac

SEQ ID NO: 2214 - RNA, 19 nt, Artificial Sequence
  Description of Artificial Sequence: Synthetic oligonucleotide
cugauacaagacaaaaaca

SEQ ID NO: 2215 - RNA, 19 nt, Artificial Sequence
  Description of Artificial Sequence: Synthetic oligonucleotide
ugauacaagacaaaaacag

SEQ ID NO: 2216 - RNA, 19 nt, Artificial Sequence
  Description of Artificial Sequence: Synthetic oligonucleotide
gauacaagacaaaaacagu

SEQ ID NO: 2217 - RNA, 19 nt, Artificial Sequence
  Description of Artificial Sequence: Synthetic oligonucleotide
auacaagacaaaaacaguu

SEQ ID NO: 2218 - RNA, 19 nt, Artificial Sequence
  Description of Artificial Sequence: Synthetic oligonucleotide
uacaagacaaaaacaguuc

SEQ ID NO: 2219 - RNA, 19 nt, Artificial Sequence
  Description of Artificial Sequence: Synthetic oligonucleotide
acaagacaaaaacaguucc

SEQ ID NO: 2220 - RNA, 19 nt, Artificial Sequence
  Description of Artificial Sequence: Synthetic oligonucleotide
caagacaaaaacaguuccu

SEQ ID NO: 2221 - RNA, 19 nt, Artificial Sequence
  Description of Artificial Sequence: Synthetic oligonucleotide
aagacaaaaacaguuccuu

SEQ ID NO: 2222 - RNA, 19 nt, Artificial Sequence
  Description of Artificial Sequence: Synthetic oligonucleotide
agacaaaaacaguuccuuc

SEQ ID NO: 2223 - RNA, 19 nt, Artificial Sequence
  Description of Artificial Sequence: Synthetic oligonucleotide
gacaaaaacaguuccuuca

SEQ ID NO: 2224 - RNA, 19 nt, Artificial Sequence
  Description of Artificial Sequence: Synthetic oligonucleotide
acaaaaacaguuccuucag

SEQ ID NO: 2225 - RNA, 19 nt, Artificial Sequence
  Description of Artificial Sequence: Synthetic oligonucleotide
caaaaacaguuccuucaga

SEQ ID NO: 2226 - RNA, 19 nt, Artificial Sequence
  Description of Artificial Sequence: Synthetic oligonucleotide
aaaaacaguuccuucagau

SEQ ID NO: 2227 - RNA, 19 nt, Artificial Sequence
  Description of Artificial Sequence: Synthetic oligonucleotide
aaaacaguuccuucagauu

SEQ ID NO: 2228 - RNA, 19 nt, Artificial Sequence
  Description of Artificial Sequence: Synthetic oligonucleotide
aaacaguuccuucagauuc

SEQ ID NO: 2229 - RNA, 19 nt, Artificial Sequence
  Description of Artificial Sequence: Synthetic oligonucleotide
aacaguuccuucagauucu

SEQ ID NO: 2230 - RNA, 19 nt, Artificial Sequence
  Description of Artificial Sequence: Synthetic oligonucleotide
acaguuccuucagauucua

SEQ ID NO: 2231 - RNA, 19 nt, Artificial Sequence
  Description of Artificial Sequence: Synthetic oligonucleotide
caguuccuucagauucuac

SEQ ID NO: 2232 - RNA, 19 nt, Artificial Sequence
  Description of Artificial Sequence: Synthetic oligonucleotide
aguuccuucagauucuacg

SEQ ID NO: 2233 - RNA, 19 nt, Artificial Sequence
  Description of Artificial Sequence: Synthetic oligonucleotide
guuccuucagauucuacgg

SEQ ID NO: 2234 - RNA, 19 nt, Artificial Sequence
  Description of Artificial Sequence: Synthetic oligonucleotide
uuccuucagauucuacgga

SEQ ID NO: 2235 - RNA, 19 nt, Artificial Sequence
  Description of Artificial Sequence: Synthetic oligonucleotide
uccuucagauucuacggaa

SEQ ID NO: 2236 - RNA, 19 nt, Artificial Sequence
  Description of Artificial Sequence: Synthetic oligonucleotide
ccuucagauucuacggaau

SEQ ID NO: 2237 - RNA, 19 nt, Artificial Sequence
  Description of Artificial Sequence: Synthetic oligonucleotide
cuucagauucuacggaaug

SEQ ID NO: 2238 - RNA, 19 nt, Artificial Sequence
  Description of Artificial Sequence: Synthetic oligonucleotide
uucagauucuacggaauga

SEQ ID NO: 2239 - RNA, 19 nt, Artificial Sequence
  Description of Artificial Sequence: Synthetic oligonucleotide
ucagauucuacggaaugac

SEQ ID NO: 2240 - RNA, 19 nt, Artificial Sequence
  Description of Artificial Sequence: Synthetic oligonucleotide
cagauucuacggaaugaca

SEQ ID NO: 2241 - RNA, 19 nt, Artificial Sequence
  Description of Artificial Sequence: Synthetic oligonucleotide
agauucuacggaaugacag

SEQ ID NO: 2242 - RNA, 19 nt, Artificial Sequence
  Description of Artificial Sequence: Synthetic oligonucleotide
gauucuacggaaugacagu

SEQ ID NO: 2243 - RNA, 19 nt, Artificial Sequence
  Description of Artificial Sequence: Synthetic oligonucleotide
auucuacggaaugacagua

SEQ ID NO: 2244 - RNA, 19 nt, Artificial Sequence
  Description of Artificial Sequence: Synthetic oligonucleotide
uucuacggaaugacaguau

SEQ ID NO: 2245 - RNA, 19 nt, Artificial Sequence
  Description of Artificial Sequence: Synthetic oligonucleotide
ucuacggaaugacaguaua

SEQ ID NO: 2246 - RNA, 19 nt, Artificial Sequence
  Description of Artificial Sequence: Synthetic oligonucleotide
cuacggaaugacaguauau

SEQ ID NO: 2247 - RNA, 19 nt, Artificial Sequence
  Description of Artificial Sequence: Synthetic oligonucleotide
uacggaaugacaguauauc

SEQ ID NO: 2248 - RNA, 19 nt, Artificial Sequence
  Description of Artificial Sequence: Synthetic oligonucleotide
acggaaugacaguauaucu

SEQ ID NO: 2249 - RNA, 19 nt, Artificial Sequence
  Description of Artificial Sequence: Synthetic oligonucleotide
cggaaugacaguauaucuc

SEQ ID NO: 2250 - RNA, 19 nt, Artificial Sequence
  Description of Artificial Sequence: Synthetic oligonucleotide
ggaaugacaguauaucucu

SEQ ID NO: 2251 - RNA, 19 nt, Artificial Sequence
  Description of Artificial Sequence: Synthetic oligonucleotide
gaaugacaguauaucucuc

SEQ ID NO: 2252 - RNA, 19 nt, Artificial Sequence
  Description of Artificial Sequence: Synthetic oligonucleotide
aaugacaguauaucucucu

SEQ ID NO: 2253 - RNA, 19 nt, Artificial Sequence
  Description of Artificial Sequence: Synthetic oligonucleotide
augacaguauaucucucuu

SEQ ID NO: 2254 - RNA, 19 nt, Artificial Sequence
  Description of Artificial Sequence: Synthetic oligonucleotide
ugacaguauaucucucuuu

SEQ ID NO: 2255 - RNA, 19 nt, Artificial Sequence
  Description of Artificial Sequence: Synthetic oligonucleotide
gacaguauaucucucuuua

SEQ ID NO: 2256 - RNA, 19 nt, Artificial Sequence
  Description of Artificial Sequence: Synthetic oligonucleotide
acaguauaucucucuuuau

SEQ ID NO: 2257 - RNA, 19 nt, Artificial Sequence
  Description of Artificial Sequence: Synthetic oligonucleotide
caguauaucucucuuuauc

SEQ ID NO: 2258 - RNA, 19 nt, Artificial Sequence
  Description of Artificial Sequence: Synthetic oligonucleotide
aguauaucucucuuuaucc

SEQ ID NO: 2259 - RNA, 19 nt, Artificial Sequence
  Description of Artificial Sequence: Synthetic oligonucleotide
guauaucucucuuuauccu

SEQ ID NO: 2260 - RNA, 19 nt, Artificial Sequence
  Description of Artificial Sequence: Synthetic oligonucleotide
uauaucucucuuuauccua

SEQ ID NO: 2261 - RNA, 19 nt, Artificial Sequence
  Description of Artificial Sequence: Synthetic oligonucleotide
auaucucucuuuauccuau

SEQ ID NO: 2262 - RNA, 19 nt, Artificial Sequence
  Description of Artificial Sequence: Synthetic oligonucleotide
uaucucucuuuauccuaug

SEQ ID NO: 2263 - RNA, 19 nt, Artificial Sequence
  Description of Artificial Sequence: Synthetic oligonucleotide
aucucucuuuauccuaugu

SEQ ID NO: 2264 - RNA, 19 nt, Artificial Sequence
  Description of Artificial Sequence: Synthetic oligonucleotide
ucucucuuuauccuaugug

SEQ ID NO: 2265 - RNA, 19 nt, Artificial Sequence
  Description of Artificial Sequence: Synthetic oligonucleotide
cucucuuuauccuauguga

SEQ ID NO: 2266 - RNA, 19 nt, Artificial Sequence
  Description of Artificial Sequence: Synthetic oligonucleotide
ucucuuuauccuaugugau

SEQ ID NO: 2267 - RNA, 19 nt, Artificial Sequence
  Description of Artificial Sequence: Synthetic oligonucleotide
cucuuuauccuaugugauu

SEQ ID NO: 2268 - RNA, 19 nt, Artificial Sequence
  Description of Artificial Sequence: Synthetic oligonucleotide
ucuuuauccuaugugauuc

SEQ ID NO: 2269 - RNA, 19 nt, Artificial Sequence
  Description of Artificial Sequence: Synthetic oligonucleotide
cuuuauccuaugugauucc

SEQ ID NO: 2270 - RNA, 19 nt, Artificial Sequence
  Description of Artificial Sequence: Synthetic oligonucleotide
uuuauccuaugugauuccu

SEQ ID NO: 2271 - RNA, 19 nt, Artificial Sequence
  Description of Artificial Sequence: Synthetic oligonucleotide
uuauccuaugugauuccug

SEQ ID NO: 2272 - RNA, 19 nt, Artificial Sequence
  Description of Artificial Sequence: Synthetic oligonucleotide
uauccuaugugauuccugc

SEQ ID NO: 2273 - RNA, 19 nt, Artificial Sequence
  Description of Artificial Sequence: Synthetic oligonucleotide
auccuaugugauuccugcu

SEQ ID NO: 2274 - RNA, 19 nt, Artificial Sequence
  Description of Artificial Sequence: Synthetic oligonucleotide
uccuaugugauuccugcuc

SEQ ID NO: 2275 - RNA, 19 nt, Artificial Sequence
  Description of Artificial Sequence: Synthetic oligonucleotide
ccuaugugauuccugcucu

SEQ ID NO: 2276 - RNA, 19 nt, Artificial Sequence
  Description of Artificial Sequence: Synthetic oligonucleotide
cuaugugauuccugcucug

SEQ ID NO: 2277 - RNA, 19 nt, Artificial Sequence
  Description of Artificial Sequence: Synthetic oligonucleotide
uaugugauuccugcucuga

SEQ ID NO: 2278 - RNA, 19 nt, Artificial Sequence
  Description of Artificial Sequence: Synthetic oligonucleotide
augugauuccugcucugaa

SEQ ID NO: 2279 - RNA, 19 nt, Artificial Sequence
  Description of Artificial Sequence: Synthetic oligonucleotide
ugugauuccugcucugaau

SEQ ID NO: 2280 - RNA, 19 nt, Artificial Sequence
  Description of Artificial Sequence: Synthetic oligonucleotide
gugauuccugcucugaaug

SEQ ID NO: 2281 - RNA, 19 nt, Artificial Sequence
  Description of Artificial Sequence: Synthetic oligonucleotide
ugauuccugcucugaaugc

SEQ ID NO: 2282 - RNA, 19 nt, Artificial Sequence
  Description of Artificial Sequence: Synthetic oligonucleotide
gauuccugcucugaaugca

SEQ ID NO: 2283 - RNA, 19 nt, Artificial Sequence
  Description of Artificial Sequence: Synthetic oligonucleotide
auuccugcucugaaugcau

SEQ ID NO: 2284 - RNA, 19 nt, Artificial Sequence
  Description of Artificial Sequence: Synthetic oligonucleotide
uuccugcucugaaugcauu

SEQ ID NO: 2285 - RNA, 19 nt, Artificial Sequence
  Description of Artificial Sequence: Synthetic oligonucleotide
uccugcucugaaugcauua

SEQ ID NO: 2286 - RNA, 19 nt, Artificial Sequence
  Description of Artificial Sequence: Synthetic oligonucleotide
ccugcucugaaugcauuau

SEQ ID NO: 2287 - RNA, 19 nt, Artificial Sequence
  Description of Artificial Sequence: Synthetic oligonucleotide
cugcucugaaugcauuaua

SEQ ID NO: 2288 - RNA, 19 nt, Artificial Sequence
  Description of Artificial Sequence: Synthetic oligonucleotide
ugcucugaaugcauuauau

SEQ ID NO: 2289 - RNA, 19 nt, Artificial Sequence
  Description of Artificial Sequence: Synthetic oligonucleotide
gcucugaaugcauuauauu

SEQ ID NO: 2290 - RNA, 19 nt, Artificial Sequence
  Description of Artificial Sequence: Synthetic oligonucleotide
cucugaaugcauuauauuu

SEQ ID NO: 2291 - RNA, 19 nt, Artificial Sequence
  Description of Artificial Sequence: Synthetic oligonucleotide
ucugaaugcauuauauuuu

SEQ ID NO: 2292 - RNA, 19 nt, Artificial Sequence
  Description of Artificial Sequence: Synthetic oligonucleotide
cugaaugcauuauauuuuc

SEQ ID NO: 2293 - RNA, 19 nt, Artificial Sequence
  Description of Artificial Sequence: Synthetic oligonucleotide
ugaaugcauuauauuuucc

SEQ ID NO: 2294 - RNA, 19 nt, Artificial Sequence
  Description of Artificial Sequence: Synthetic oligonucleotide
gaaugcauuauauuuucca

SEQ ID NO: 2295 - RNA, 19 nt, Artificial Sequence
  Description of Artificial Sequence: Synthetic oligonucleotide
aaugcauuauauuuuccaa

SEQ ID NO: 2296 - RNA, 19 nt, Artificial Sequence
  Description of Artificial Sequence: Synthetic oligonucleotide
augcauuauauuuuccaaa

SEQ ID NO: 2297 - RNA, 19 nt, Artificial Sequence
  Description of Artificial Sequence: Synthetic oligonucleotide
ugcauuauauuuuccaaac

SEQ ID NO: 2298 - RNA, 19 nt, Artificial Sequence
  Description of Artificial Sequence: Synthetic oligonucleotide
gcauuauauuuuccaaacu

SEQ ID NO: 2299 - RNA, 19 nt, Artificial Sequence
  Description of Artificial Sequence: Synthetic oligonucleotide
cauuauauuuuccaaacua

SEQ ID NO: 2300 - RNA, 19 nt, Artificial Sequence
  Description of Artificial Sequence: Synthetic oligonucleotide
auuauauuuuccaaacuau

SEQ ID NO: 2301 - RNA, 19 nt, Artificial Sequence
  Description of Artificial Sequence: Synthetic oligonucleotide
uuauauuuuccaaacuaua

SEQ ID NO: 2302 - RNA, 19 nt, Artificial Sequence
  Description of Artificial Sequence: Synthetic oligonucleotide
uauauuuuccaaacuauac

SEQ ID NO: 2303 - RNA, 19 nt, Artificial Sequence
  Description of Artificial Sequence: Synthetic oligonucleotide
auauuuuccaaacuauacc

SEQ ID NO: 2304 - RNA, 19 nt, Artificial Sequence
  Description of Artificial Sequence: Synthetic oligonucleotide
uauuuuccaaacuauaccc

SEQ ID NO: 2305 - RNA, 19 nt, Artificial Sequence
  Description of Artificial Sequence: Synthetic oligonucleotide
auuuuccaaacuauaccca

SEQ ID NO: 2306 - RNA, 19 nt, Artificial Sequence
  Description of Artificial Sequence: Synthetic oligonucleotide
uuuuccaaacuauacccau

SEQ ID NO: 2307 - RNA, 19 nt, Artificial Sequence
  Description of Artificial Sequence: Synthetic oligonucleotide
uuuccaaacuauacccaua

SEQ ID NO: 2308 - RNA, 19 nt, Artificial Sequence
  Description of Artificial Sequence: Synthetic oligonucleotide
uuccaaacuauacccauaa

SEQ ID NO: 2309 - RNA, 19 nt, Artificial Sequence
  Description of Artificial Sequence: Synthetic oligonucleotide
uccaaacuauacccauaaa

SEQ ID NO: 2310 - RNA, 19 nt, Artificial Sequence
  Description of Artificial Sequence: Synthetic oligonucleotide
ccaaacuauacccauaaau

SEQ ID NO: 2311 - RNA, 19 nt, Artificial Sequence
  Description of Artificial Sequence: Synthetic oligonucleotide
caaacuauacccauaaauu

SEQ ID NO: 2312 - RNA, 19 nt, Artificial Sequence
  Description of Artificial Sequence: Synthetic oligonucleotide
aaacuauacccauaaauug

SEQ ID NO: 2313 - RNA, 19 nt, Artificial Sequence
  Description of Artificial Sequence: Synthetic oligonucleotide
aacuauacccauaaauugu

SEQ ID NO: 2314 - RNA, 19 nt, Artificial Sequence
  Description of Artificial Sequence: Synthetic oligonucleotide
acuauacccauaaauugug

SEQ ID NO: 2315 - RNA, 19 nt, Artificial Sequence
  Description of Artificial Sequence: Synthetic oligonucleotide
cuauacccauaaauuguga

SEQ ID NO: 2316 - RNA, 19 nt, Artificial Sequence
  Description of Artificial Sequence: Synthetic oligonucleotide
uauacccauaaauugugac

SEQ ID NO: 2317 - RNA, 19 nt, Artificial Sequence
  Description of Artificial Sequence: Synthetic oligonucleotide
auacccauaaauugugacu

SEQ ID NO: 2318 - RNA, 19 nt, Artificial Sequence
  Description of Artificial Sequence: Synthetic oligonucleotide
uacccauaaauugugacua

SEQ ID NO: 2319 - RNA, 19 nt, Artificial Sequence
  Description of Artificial Sequence: Synthetic oligonucleotide
acccauaaauugugacuag

SEQ ID NO: 2320 - RNA, 19 nt, Artificial Sequence
  Description of Artificial Sequence: Synthetic oligonucleotide
cccauaaauugugacuagu

SEQ ID NO: 2321 - RNA, 19 nt, Artificial Sequence
  Description of Artificial Sequence: Synthetic oligonucleotide
ccauaaauugugacuagua

SEQ ID NO: 2322 - RNA, 19 nt, Artificial Sequence
  Description of Artificial Sequence: Synthetic oligonucleotide
cauaaauugugacuaguaa

SEQ ID NO: 2323 - RNA, 19 nt, Artificial Sequence
  Description of Artificial Sequence: Synthetic oligonucleotide
auaaauugugacuaguaaa

SEQ ID NO: 2324 - RNA, 19 nt, Artificial Sequence
  Description of Artificial Sequence: Synthetic oligonucleotide
uaaauugugacuaguaaaa

SEQ ID NO: 2325 - RNA, 19 nt, Artificial Sequence
  Description of Artificial Sequence: Synthetic oligonucleotide
aaauugugacuaguaaaau

SEQ ID NO: 2326 - RNA, 19 nt, Artificial Sequence
  Description of Artificial Sequence: Synthetic oligonucleotide
aauugugacuaguaaaaua

SEQ ID NO: 2327 - RNA, 19 nt, Artificial Sequence
  Description of Artificial Sequence: Synthetic oligonucleotide
auugugacuaguaaaauac

SEQ ID NO: 2328 - RNA, 19 nt, Artificial Sequence
  Description of Artificial Sequence: Synthetic oligonucleotide
uugugacuaguaaaauacu

SEQ ID NO: 2329 - RNA, 19 nt, Artificial Sequence
  Description of Artificial Sequence: Synthetic oligonucleotide
ugugacuaguaaaauacuu

SEQ ID NO: 2330 - RNA, 19 nt, Artificial Sequence
  Description of Artificial Sequence: Synthetic oligonucleotide
gugacuaguaaaauacuua

SEQ ID NO: 2331 - RNA, 19 nt, Artificial Sequence
  Description of Artificial Sequence: Synthetic oligonucleotide
ugacuaguaaaauacuuac

SEQ ID NO: 2332 - RNA, 19 nt, Artificial Sequence
  Description of Artificial Sequence: Synthetic oligonucleotide
gacuaguaaaauacuuaca

SEQ ID NO: 2333 - RNA, 19 nt, Artificial Sequence
  Description of Artificial Sequence: Synthetic oligonucleotide
acuaguaaaauacuuacac

SEQ ID NO: 2334 - RNA, 19 nt, Artificial Sequence
  Description of Artificial Sequence: Synthetic oligonucleotide
cuaguaaaauacuuacaca

SEQ ID NO: 2335 - RNA, 19 nt, Artificial Sequence
  Description of Artificial Sequence: Synthetic oligonucleotide
uaguaaaauacuuacacag

SEQ ID NO: 2336 - RNA, 19 nt, Artificial Sequence
  Description of Artificial Sequence: Synthetic oligonucleotide
aguaaaauacuuacacaga

SEQ ID NO: 2337 - RNA, 19 nt, Artificial Sequence
  Description of Artificial Sequence: Synthetic oligonucleotide
guaaaauacuuacacagag

SEQ ID NO: 2338 - RNA, 19 nt, Artificial Sequence
  Description of Artificial Sequence: Synthetic oligonucleotide
uaaaauacuuacacagagc

SEQ ID NO: 2339 - RNA, 19 nt, Artificial Sequence
  Description of Artificial Sequence: Synthetic oligonucleotide
aaaauacuuacacagagca

SEQ ID NO: 2340 - RNA, 19 nt, Artificial Sequence
  Description of Artificial Sequence: Synthetic oligonucleotide
aaauacuuacacagagcag

SEQ ID NO: 2341 - RNA, 19 nt, Artificial Sequence
  Description of Artificial Sequence: Synthetic oligonucleotide
aauacuuacacagagcaga

SEQ ID NO: 2342 - RNA, 19 nt, Artificial Sequence
  Description of Artificial Sequence: Synthetic oligonucleotide
auacuuacacagagcagaa

SEQ ID NO: 2343 - RNA, 19 nt, Artificial Sequence
  Description of Artificial Sequence: Synthetic oligonucleotide
uacuuacacagagcagaau

SEQ ID NO: 2344 - RNA, 19 nt, Artificial Sequence
  Description of Artificial Sequence: Synthetic oligonucleotide
acuuacacagagcagaauu

SEQ ID NO: 2345 - RNA, 19 nt, Artificial Sequence
  Description of Artificial Sequence: Synthetic oligonucleotide
cuuacacagagcagaauuu

SEQ ID NO: 2346 - RNA, 19 nt, Artificial Sequence
  Description of Artificial Sequence: Synthetic oligonucleotide
uuacacagagcagaauuuu

SEQ ID NO: 2347 - RNA, 19 nt, Artificial Sequence
  Description of Artificial Sequence: Synthetic oligonucleotide
uacacagagcagaauuuuc

SEQ ID NO: 2348 - RNA, 19 nt, Artificial Sequence
  Description of Artificial Sequence: Synthetic oligonucleotide
acacagagcagaauuuuca

SEQ ID NO: 2349 - RNA, 19 nt, Artificial Sequence
  Description of Artificial Sequence: Synthetic oligonucleotide
cacagagcagaauuuucac

SEQ ID NO: 2350 - RNA, 19 nt, Artificial Sequence
  Description of Artificial Sequence: Synthetic oligonucleotide
acagagcagaauuuucaca

SEQ ID NO: 2351 - RNA, 19 nt, Artificial Sequence
  Description of Artificial Sequence: Synthetic oligonucleotide
cagagcagaauuuucacag

SEQ ID NO: 2352 - RNA, 19 nt, Artificial Sequence
  Description of Artificial Sequence: Synthetic oligonucleotide
agagcagaauuuucacaga

SEQ ID NO: 2353 - RNA, 19 nt, Artificial Sequence
  Description of Artificial Sequence: Synthetic oligonucleotide
gagcagaauuuucacagau

SEQ ID NO: 2354 - RNA, 19 nt, Artificial Sequence
  Description of Artificial Sequence: Synthetic oligonucleotide
agcagaauuuucacagaug

SEQ ID NO: 2355 - RNA, 19 nt, Artificial Sequence
  Description of Artificial Sequence: Synthetic oligonucleotide
gcagaauuuucacagaugg

SEQ ID NO: 2356 - RNA, 19 nt, Artificial Sequence
  Description of Artificial Sequence: Synthetic oligonucleotide
cagaauuuucacagauggc

SEQ ID NO: 2357 - RNA, 19 nt, Artificial Sequence
  Description of Artificial Sequence: Synthetic oligonucleotide
agaauuuucacagauggca

SEQ ID NO: 2358 - RNA, 19 nt, Artificial Sequence
  Description of Artificial Sequence: Synthetic oligonucleotide
gaauuuucacagauggcaa

SEQ ID NO: 2359 - RNA, 19 nt, Artificial Sequence
  Description of Artificial Sequence: Synthetic oligonucleotide
aauuuucacagauggcaaa

SEQ ID NO: 2360 - RNA, 19 nt, Artificial Sequence
  Description of Artificial Sequence: Synthetic oligonucleotide
auuuucacagauggcaaaa

SEQ ID NO: 2361 - RNA, 19 nt, Artificial Sequence
  Description of Artificial Sequence: Synthetic oligonucleotide
uuuucacagauggcaaaaa

SEQ ID NO: 2362 - RNA, 19 nt, Artificial Sequence
  Description of Artificial Sequence: Synthetic oligonucleotide
uuucacagauggcaaaaaa

SEQ ID NO: 2363 - RNA, 19 nt, Artificial Sequence
  Description of Artificial Sequence: Synthetic oligonucleotide
uucacagauggcaaaaaaa

SEQ ID NO: 2364 - RNA, 19 nt, Artificial Sequence
  Description of Artificial Sequence: Synthetic oligonucleotide
ucacagauggcaaaaaaau

SEQ ID NO: 2365 - RNA, 19 nt, Artificial Sequence
  Description of Artificial Sequence: Synthetic oligonucleotide
cacagauggcaaaaaaauu

SEQ ID NO: 2366 - RNA, 19 nt, Artificial Sequence
  Description of Artificial Sequence: Synthetic oligonucleotide
acagauggcaaaaaaauuu

SEQ ID NO: 2367 - RNA, 19 nt, Artificial Sequence
  Description of Artificial Sequence: Synthetic oligonucleotide
cagauggcaaaaaaauuua

SEQ ID NO: 2368 - RNA, 19 nt, Artificial Sequence
  Description of Artificial Sequence: Synthetic oligonucleotide
agauggcaaaaaaauuuaa

SEQ ID NO: 2369 - RNA, 19 nt, Artificial Sequence
  Description of Artificial Sequence: Synthetic oligonucleotide
gauggcaaaaaaauuuaaa

SEQ ID NO: 2370 - RNA, 19 nt, Artificial Sequence
  Description of Artificial Sequence: Synthetic oligonucleotide
auggcaaaaaaauuuaaag

SEQ ID NO: 2371 - RNA, 19 nt, Artificial Sequence
  Description of Artificial Sequence: Synthetic oligonucleotide
uggcaaaaaaauuuaaaga

SEQ ID NO: 2372 - RNA, 19 nt, Artificial Sequence
  Description of Artificial Sequence: Synthetic oligonucleotide
ggcaaaaaaauuuaaagau

SEQ ID NO: 2373 - RNA, 19 nt, Artificial Sequence
  Description of Artificial Sequence: Synthetic oligonucleotide
gcaaaaaaauuuaaagaug

SEQ ID NO: 2374 - RNA, 19 nt, Artificial Sequence
  Description of Artificial Sequence: Synthetic oligonucleotide
caaaaaaauuuaaagaugu

SEQ ID NO: 2375 - RNA, 19 nt, Artificial Sequence
  Description of Artificial Sequence: Synthetic oligonucleotide
aaaaaaauuuaaagauguc

SEQ ID NO: 2376 - RNA, 19 nt, Artificial Sequence
  Description of Artificial Sequence: Synthetic oligonucleotide
aaaaaauuuaaagaugucc

SEQ ID NO: 2377 - RNA, 19 nt, Artificial Sequence
  Description of Artificial Sequence: Synthetic oligonucleotide
aaaaauuuaaagaugucca

SEQ ID NO: 2378 - RNA, 19 nt, Artificial Sequence
  Description of Artificial Sequence: Synthetic oligonucleotide
aaaauuuaaagauguccaa

SEQ ID NO: 2379 - RNA, 19 nt, Artificial Sequence
  Description of Artificial Sequence: Synthetic oligonucleotide
aaauuuaaagauguccaau

SEQ ID NO: 2380 - RNA, 19 nt, Artificial Sequence
  Description of Artificial Sequence: Synthetic oligonucleotide
aauuuaaagauguccaaua

SEQ ID NO: 2381 - RNA, 19 nt, Artificial Sequence
  Description of Artificial Sequence: Synthetic oligonucleotide
auuuaaagauguccaauau

SEQ ID NO: 2382 - RNA, 19 nt, Artificial Sequence
  Description of Artificial Sequence: Synthetic oligonucleotide
uuuaaagauguccaauaua

SEQ ID NO: 2383 - RNA, 19 nt, Artificial Sequence
  Description of Artificial Sequence: Synthetic oligonucleotide
uuaaagauguccaauauau

SEQ ID NO: 2384 - RNA, 19 nt, Artificial Sequence
  Description of Artificial Sequence: Synthetic oligonucleotide
uaaagauguccaauauaug

SEQ ID NO: 2385 - RNA, 19 nt, Artificial Sequence
  Description of Artificial Sequence: Synthetic oligonucleotide
aaagauguccaauauaugu

SEQ ID NO: 2386 - RNA, 19 nt, Artificial Sequence
  Description of Artificial Sequence: Synthetic oligonucleotide
aagauguccaauauaugug

SEQ ID NO: 2387 - RNA, 19 nt, Artificial Sequence
  Description of Artificial Sequence: Synthetic oligonucleotide
agauguccaauauaugugg

SEQ ID NO: 2388 - RNA, 19 nt, Artificial Sequence
  Description of Artificial Sequence: Synthetic oligonucleotide
gauguccaauauauguggg

SEQ ID NO: 2389 - RNA, 19 nt, Artificial Sequence
  Description of Artificial Sequence: Synthetic oligonucleotide
auguccaauauauguggga

SEQ ID NO: 2390 - RNA, 19 nt, Artificial Sequence
  Description of Artificial Sequence: Synthetic oligonucleotide
uguccaauauaugugggaa

SEQ ID NO: 2391 - RNA, 19 nt, Artificial Sequence
  Description of Artificial Sequence: Synthetic oligonucleotide
guccaauauaugugggaaa

SEQ ID NO: 2392 - RNA, 19 nt, Artificial Sequence
  Description of Artificial Sequence: Synthetic oligonucleotide
uccaauauaugugggaaaa

SEQ ID NO: 2393 - RNA, 19 nt, Artificial Sequence
  Description of Artificial Sequence: Synthetic oligonucleotide
ccaauauaugugggaaaag

SEQ ID NO: 2394 - RNA, 19 nt, Artificial Sequence
  Description of Artificial Sequence: Synthetic oligonucleotide
caauauaugugggaaaaga

SEQ ID NO: 2395 - RNA, 19 nt, Artificial Sequence
  Description of Artificial Sequence: Synthetic oligonucleotide
aauauaugugggaaaagag

SEQ ID NO: 2396 - RNA, 19 nt, Artificial Sequence
  Description of Artificial Sequence: Synthetic oligonucleotide
auauaugugggaaaagagc

SEQ ID NO: 2397 - RNA, 19 nt, Artificial Sequence
  Description of Artificial Sequence: Synthetic oligonucleotide
uauaugugggaaaagagcu

SEQ ID NO: 2398 - RNA, 19 nt, Artificial Sequence
  Description of Artificial Sequence: Synthetic oligonucleotide
auaugugggaaaagagcua

SEQ ID NO: 2399 - RNA, 19 nt, Artificial Sequence
  Description of Artificial Sequence: Synthetic oligonucleotide
uaugugggaaaagagcuaa

SEQ ID NO: 2400 - RNA, 19 nt, Artificial Sequence
  Description of Artificial Sequence: Synthetic oligonucleotide
augugggaaaagagcuaac

SEQ ID NO: 2401 - RNA, 19 nt, Artificial Sequence
  Description of Artificial Sequence: Synthetic oligonucleotide
ugugggaaaagagcuaaca

SEQ ID NO: 2402 - RNA, 19 nt, Artificial Sequence
  Description of Artificial Sequence: Synthetic oligonucleotide
gugggaaaagagcuaacag

SEQ ID NO: 2403 - RNA, 19 nt, Artificial Sequence
  Description of Artificial Sequence: Synthetic oligonucleotide
ugggaaaagagcuaacaga

SEQ ID NO: 2404 - RNA, 19 nt, Artificial Sequence
  Description of Artificial Sequence: Synthetic oligonucleotide
gggaaaagagcuaacagag

SEQ ID NO: 2405 - RNA, 19 nt, Artificial Sequence
  Description of Artificial Sequence: Synthetic oligonucleotide
ggaaaagagcuaacagaga

SEQ ID NO: 2406 - RNA, 19 nt, Artificial Sequence
  Description of Artificial Sequence: Synthetic oligonucleotide
gaaaagagcuaacagagag

SEQ ID NO: 2407 - RNA, 19 nt, Artificial Sequence
  Description of Artificial Sequence: Synthetic oligonucleotide
aaaagagcuaacagagaga

SEQ ID NO: 2408 - RNA, 19 nt, Artificial Sequence
  Description of Artificial Sequence: Synthetic oligonucleotide
aaagagcuaacagagagau

SEQ ID NO: 2409 - RNA, 19 nt, Artificial Sequence
  Description of Artificial Sequence: Synthetic oligonucleotide
aagagcuaacagagagauc

SEQ ID NO: 2410 - RNA, 19 nt, Artificial Sequence
  Description of Artificial Sequence: Synthetic oligonucleotide
agagcuaacagagagauca

SEQ ID NO: 2411 - RNA, 19 nt, Artificial Sequence
  Description of Artificial Sequence: Synthetic oligonucleotide
gagcuaacagagagaucau

SEQ ID NO: 2412 - RNA, 19 nt, Artificial Sequence
  Description of Artificial Sequence: Synthetic oligonucleotide
agcuaacagagagaucauu

SEQ ID NO: 2413 - RNA, 19 nt, Artificial Sequence
  Description of Artificial Sequence: Synthetic oligonucleotide
gcuaacagagagaucauua

SEQ ID NO: 2414 - RNA, 19 nt, Artificial Sequence
  Description of Artificial Sequence: Synthetic oligonucleotide
cuaacagagagaucauuau

SEQ ID NO: 2415 - RNA, 19 nt, Artificial Sequence
  Description of Artificial Sequence: Synthetic oligonucleotide
uaacagagagaucauuauu

SEQ ID NO: 2416 - RNA, 19 nt, Artificial Sequence
  Description of Artificial Sequence: Synthetic oligonucleotide
aacagagagaucauuauuu

SEQ ID NO: 2417 - RNA, 19 nt, Artificial Sequence
  Description of Artificial Sequence: Synthetic oligonucleotide
acagagagaucauuauuuc

SEQ ID NO: 2418 - RNA, 19 nt, Artificial Sequence
  Description of Artificial Sequence: Synthetic oligonucleotide
cagagagaucauuauuucu

SEQ ID NO: 2419 - RNA, 19 nt, Artificial Sequence
  Description of Artificial Sequence: Synthetic oligonucleotide
agagagaucauuauuucuu

SEQ ID NO: 2420 - RNA, 19 nt, Artificial Sequence
  Description of Artificial Sequence: Synthetic oligonucleotide
gagagaucauuauuucuua

SEQ ID NO: 2421 - RNA, 19 nt, Artificial Sequence
  Description of Artificial Sequence: Synthetic oligonucleotide
agagaucauuauuucuuaa

SEQ ID NO: 2422 - RNA, 19 nt, Artificial Sequence
  Description of Artificial Sequence: Synthetic oligonucleotide
gagaucauuauuucuuaaa

SEQ ID NO: 2423 - RNA, 19 nt, Artificial Sequence
  Description of Artificial Sequence: Synthetic oligonucleotide
agaucauuauuucuuaaag

SEQ ID NO: 2424 - RNA, 19 nt, Artificial Sequence
  Description of Artificial Sequence: Synthetic oligonucleotide
gaucauuauuucuuaaaga

SEQ ID NO: 2425 - RNA, 19 nt, Artificial Sequence
  Description of Artificial Sequence: Synthetic oligonucleotide
aucauuauuucuuaaagau

SEQ ID NO: 2426 - RNA, 19 nt, Artificial Sequence
  Description of Artificial Sequence: Synthetic oligonucleotide
ucauuauuucuuaaagauu

SEQ ID NO: 2427 - RNA, 19 nt, Artificial Sequence
  Description of Artificial Sequence: Synthetic oligonucleotide
cauuauuucuuaaagauug

SEQ ID NO: 2428 - RNA, 19 nt, Artificial Sequence
  Description of Artificial Sequence: Synthetic oligonucleotide
auuauuucuuaaagauugg

SEQ ID NO: 2429 - RNA, 19 nt, Artificial Sequence
  Description of Artificial Sequence: Synthetic oligonucleotide
uuauuucuuaaagauuggc

SEQ ID NO: 2430 - RNA, 19 nt, Artificial Sequence
  Description of Artificial Sequence: Synthetic oligonucleotide
uauuucuuaaagauuggcc

SEQ ID NO: 2431 - RNA, 19 nt, Artificial Sequence
  Description of Artificial Sequence: Synthetic oligonucleotide
auuucuuaaagauuggcca

SEQ ID NO: 2432 - RNA, 19 nt, Artificial Sequence
  Description of Artificial Sequence: Synthetic oligonucleotide
uuucuuaaagauuggccau

SEQ ID NO: 2433 - RNA, 19 nt, Artificial Sequence
  Description of Artificial Sequence: Synthetic oligonucleotide
uucuuaaagauuggccaua

SEQ ID NO: 2434 - RNA, 19 nt, Artificial Sequence
  Description of Artificial Sequence: Synthetic oligonucleotide
ucuuaaagauuggccauaa

SEQ ID NO: 2435 - RNA, 19 nt, Artificial Sequence
  Description of Artificial Sequence: Synthetic oligonucleotide
cuuaaagauuggccauaac

SEQ ID NO: 2436 - RNA, 19 nt, Artificial Sequence
  Description of Artificial Sequence: Synthetic oligonucleotide
uuaaagauuggccauaacc

SEQ ID NO: 2437 - RNA, 19 nt, Artificial Sequence
  Description of Artificial Sequence: Synthetic oligonucleotide
uaaagauuggccauaaccu

SEQ ID NO: 2438 - RNA, 19 nt, Artificial Sequence
  Description of Artificial Sequence: Synthetic oligonucleotide
aaagauuggccauaaccug

SEQ ID NO: 2439 - RNA, 19 nt, Artificial Sequence
  Description of Artificial Sequence: Synthetic oligonucleotide
aagauuggccauaaccugu

SEQ ID NO: 2440 - RNA, 19 nt, Artificial Sequence
  Description of Artificial Sequence: Synthetic oligonucleotide
agauuggccauaaccugua

SEQ ID NO: 2441 - RNA, 19 nt, Artificial Sequence
  Description of Artificial Sequence: Synthetic oligonucleotide
gauuggccauaaccuguau

SEQ ID NO: 2442 - RNA, 19 nt, Artificial Sequence
  Description of Artificial Sequence: Synthetic oligonucleotide
auuggccauaaccuguauu

SEQ ID NO: 2443 - RNA, 19 nt, Artificial Sequence
  Description of Artificial Sequence: Synthetic oligonucleotide
uuggccauaaccuguauuu

SEQ ID NO: 2444 - RNA, 19 nt, Artificial Sequence
  Description of Artificial Sequence: Synthetic oligonucleotide
uggccauaaccuguauuuu

SEQ ID NO: 2445 - RNA, 19 nt, Artificial Sequence
  Description of Artificial Sequence: Synthetic oligonucleotide
ggccauaaccuguauuuug

SEQ ID NO: 2446 - RNA, 19 nt, Artificial Sequence
  Description of Artificial Sequence: Synthetic oligonucleotide
gccauaaccuguauuuuga

SEQ ID NO: 2447 - RNA, 19 nt, Artificial Sequence
  Description of Artificial Sequence: Synthetic oligonucleotide
ccauaaccuguauuuugau

SEQ ID NO: 2448 - RNA, 19 nt, Artificial Sequence
  Description of Artificial Sequence: Synthetic oligonucleotide
cauaaccuguauuuugaua

SEQ ID NO: 2449 - RNA, 19 nt, Artificial Sequence
  Description of Artificial Sequence: Synthetic oligonucleotide
auaaccuguauuuugauag

SEQ ID NO: 2450 - RNA, 19 nt, Artificial Sequence
  Description of Artificial Sequence: Synthetic oligonucleotide
uaaccuguauuuugauaga

SEQ ID NO: 2451 - RNA, 19 nt, Artificial Sequence
  Description of Artificial Sequence: Synthetic oligonucleotide
aaccuguauuuugauagaa

SEQ ID NO: 2452 - RNA, 19 nt, Artificial Sequence
  Description of Artificial Sequence: Synthetic oligonucleotide
accuguauuuugauagaau

SEQ ID NO: 2453 - RNA, 19 nt, Artificial Sequence
  Description of Artificial Sequence: Synthetic oligonucleotide
ccuguauuuugauagaauu

SEQ ID NO: 2454 - RNA, 19 nt, Artificial Sequence
  Description of Artificial Sequence: Synthetic oligonucleotide
cuguauuuugauagaauua

SEQ ID NO: 2455 - RNA, 19 nt, Artificial Sequence
  Description of Artificial Sequence: Synthetic oligonucleotide
uguauuuugauagaauuag

SEQ ID NO: 2456 - RNA, 19 nt, Artificial Sequence
  Description of Artificial Sequence: Synthetic oligonucleotide
guauuuugauagaauuaga

SEQ ID NO: 2457 - RNA, 19 nt, Artificial Sequence
  Description of Artificial Sequence: Synthetic oligonucleotide
uauuuugauagaauuagau

SEQ ID NO: 2458 - RNA, 19 nt, Artificial Sequence
  Description of Artificial Sequence: Synthetic oligonucleotide
auuuugauagaauuagauu

SEQ ID NO: 2459 - RNA, 19 nt, Artificial Sequence
  Description of Artificial Sequence: Synthetic oligonucleotide
uuuugauagaauuagauug

SEQ ID NO: 2460 - RNA, 19 nt, Artificial Sequence
  Description of Artificial Sequence: Synthetic oligonucleotide
uuugauagaauuagauugg

SEQ ID NO: 2461 - RNA, 19 nt, Artificial Sequence
  Description of Artificial Sequence: Synthetic oligonucleotide
uugauagaauuagauuggu

SEQ ID NO: 2462 - RNA, 19 nt, Artificial Sequence
  Description of Artificial Sequence: Synthetic oligonucleotide
ugauagaauuagauuggua

SEQ ID NO: 2463 - RNA, 19 nt, Artificial Sequence
  Description of Artificial Sequence: Synthetic oligonucleotide
gauagaauuagauugguaa

SEQ ID NO: 2464 - RNA, 19 nt, Artificial Sequence
  Description of Artificial Sequence: Synthetic oligonucleotide
auagaauuagauugguaaa

SEQ ID NO: 2465 - RNA, 19 nt, Artificial Sequence
  Description of Artificial Sequence: Synthetic oligonucleotide
uagaauuagauugguaaau

SEQ ID NO: 2466 - RNA, 19 nt, Artificial Sequence
  Description of Artificial Sequence: Synthetic oligonucleotide
agaauuagauugguaaaua

SEQ ID NO: 2467 - RNA, 19 nt, Artificial Sequence
  Description of Artificial Sequence: Synthetic oligonucleotide
gaauuagauugguaaauac

SEQ ID NO: 2468 - RNA, 19 nt, Artificial Sequence
  Description of Artificial Sequence: Synthetic oligonucleotide
aauuagauugguaaauaca

SEQ ID NO: 2469 - RNA, 19 nt, Artificial Sequence
  Description of Artificial Sequence: Synthetic oligonucleotide
auuagauugguaaauacau

SEQ ID NO: 2470 - RNA, 19 nt, Artificial Sequence
  Description of Artificial Sequence: Synthetic oligonucleotide
uuagauugguaaauacaug

SEQ ID NO: 2471 - RNA, 19 nt, Artificial Sequence
  Description of Artificial Sequence: Synthetic oligonucleotide
uagauugguaaauacaugu

SEQ ID NO: 2472 - RNA, 19 nt, Artificial Sequence
  Description of Artificial Sequence: Synthetic oligonucleotide
agauugguaaauacaugua

SEQ ID NO: 2473 - RNA, 19 nt, Artificial Sequence
  Description of Artificial Sequence: Synthetic oligonucleotide
gauugguaaauacauguau

SEQ ID NO: 2474 - RNA, 19 nt, Artificial Sequence
  Description of Artificial Sequence: Synthetic oligonucleotide
auugguaaauacauguauu

SEQ ID NO: 2475 - RNA, 19 nt, Artificial Sequence
  Description of Artificial Sequence: Synthetic oligonucleotide
uugguaaauacauguauuc

SEQ ID NO: 2476 - RNA, 19 nt, Artificial Sequence
  Description of Artificial Sequence: Synthetic oligonucleotide
ugguaaauacauguauuca

SEQ ID NO: 2477 - RNA, 19 nt, Artificial Sequence
  Description of Artificial Sequence: Synthetic oligonucleotide
gguaaauacauguauucau

SEQ ID NO: 2478 - RNA, 19 nt, Artificial Sequence
  Description of Artificial Sequence: Synthetic oligonucleotide
guaaauacauguauucaua

SEQ ID NO: 2479 - RNA, 19 nt, Artificial Sequence
  Description of Artificial Sequence: Synthetic oligonucleotide
uaaauacauguauucauac

SEQ ID NO: 2480 - RNA, 19 nt, Artificial Sequence
  Description of Artificial Sequence: Synthetic oligonucleotide
aaauacauguauucauaca

SEQ ID NO: 2481 - RNA, 19 nt, Artificial Sequence
  Description of Artificial Sequence: Synthetic oligonucleotide
aauacauguauucauacau

SEQ ID NO: 2482 - RNA, 19 nt, Artificial Sequence
  Description of Artificial Sequence: Synthetic oligonucleotide
auacauguauucauacaua

SEQ ID NO: 2483 - RNA, 19 nt, Artificial Sequence
  Description of Artificial Sequence: Synthetic oligonucleotide
uacauguauucauacauac

SEQ ID NO: 2484 - RNA, 19 nt, Artificial Sequence
  Description of Artificial Sequence: Synthetic oligonucleotide
acauguauucauacauacu

SEQ ID NO: 2485 - RNA, 19 nt, Artificial Sequence
  Description of Artificial Sequence: Synthetic oligonucleotide
cauguauucauacauacuc

SEQ ID NO: 2486 - RNA, 19 nt, Artificial Sequence
  Description of Artificial Sequence: Synthetic oligonucleotide
auguauucauacauacucu

SEQ ID NO: 2487 - RNA, 19 nt, Artificial Sequence
  Description of Artificial Sequence: Synthetic oligonucleotide
uguauucauacauacucug

SEQ ID NO: 2488 - RNA, 19 nt, Artificial Sequence
  Description of Artificial Sequence: Synthetic oligonucleotide
guauucauacauacucugu

SEQ ID NO: 2489 - RNA, 19 nt, Artificial Sequence
  Description of Artificial Sequence: Synthetic oligonucleotide
uauucauacauacucugug

SEQ ID NO: 2490 - RNA, 19 nt, Artificial Sequence
  Description of Artificial Sequence: Synthetic oligonucleotide
auucauacauacucugugg

SEQ ID NO: 2491 - RNA, 19 nt, Artificial Sequence
  Description of Artificial Sequence: Synthetic oligonucleotide
uucauacauacucuguggu

SEQ ID NO: 2492 - RNA, 19 nt, Artificial Sequence
  Description of Artificial Sequence: Synthetic oligonucleotide
ucauacauacucuguggua

SEQ ID NO: 2493 - RNA, 19 nt, Artificial Sequence
  Description of Artificial Sequence: Synthetic oligonucleotide
cauacauacucugugguaa

SEQ ID NO: 2494 - RNA, 19 nt, Artificial Sequence
  Description of Artificial Sequence: Synthetic oligonucleotide
auacauacucugugguaau

SEQ ID NO: 2495 - RNA, 19 nt, Artificial Sequence
  Description of Artificial Sequence: Synthetic oligonucleotide
uacauacucugugguaaua

SEQ ID NO: 2496 - RNA, 19 nt, Artificial Sequence
  Description of Artificial Sequence: Synthetic oligonucleotide
acauacucugugguaauag

SEQ ID NO: 2497 - RNA, 19 nt, Artificial Sequence
  Description of Artificial Sequence: Synthetic oligonucleotide
cauacucugugguaauaga

SEQ ID NO: 2498 - RNA, 19 nt, Artificial Sequence
  Description of Artificial Sequence: Synthetic oligonucleotide
auacucugugguaauagag

SEQ ID NO: 2499 - RNA, 19 nt, Artificial Sequence
  Description of Artificial Sequence: Synthetic oligonucleotide
uacucugugguaauagaga

SEQ ID NO: 2500 - RNA, 19 nt, Artificial Sequence
  Description of Artificial Sequence: Synthetic oligonucleotide
acucugugguaauagagac

SEQ ID NO: 2501 - RNA, 19 nt, Artificial Sequence
  Description of Artificial Sequence: Synthetic oligonucleotide
cucugugguaauagagacu

SEQ ID NO: 2502 - RNA, 19 nt, Artificial Sequence
  Description of Artificial Sequence: Synthetic oligonucleotide
ucugugguaauagagacuu

SEQ ID NO: 2503 - RNA, 19 nt, Artificial Sequence
  Description of Artificial Sequence: Synthetic oligonucleotide
cugugguaauagagacuug

SEQ ID NO: 2504 - RNA, 19 nt, Artificial Sequence
  Description of Artificial Sequence: Synthetic oligonucleotide
ugugguaauagagacuuga

SEQ ID NO: 2505 - RNA, 19 nt, Artificial Sequence
  Description of Artificial Sequence: Synthetic oligonucleotide
gugguaauagagacuugag

SEQ ID NO: 2506 - RNA, 19 nt, Artificial Sequence
  Description of Artificial Sequence: Synthetic oligonucleotide
ugguaauagagacuugagc

SEQ ID NO: 2507 - RNA, 19 nt, Artificial Sequence
  Description of Artificial Sequence: Synthetic oligonucleotide
gguaauagagacuugagcu

SEQ ID NO: 2508 - RNA, 19 nt, Artificial Sequence
  Description of Artificial Sequence: Synthetic oligonucleotide
guaauagagacuugagcug

SEQ ID NO: 2509 - RNA, 19 nt, Artificial Sequence
  Description of Artificial Sequence: Synthetic oligonucleotide
uaauagagacuugagcugg

SEQ ID NO: 2510 - RNA, 19 nt, Artificial Sequence
  Description of Artificial Sequence: Synthetic oligonucleotide
aauagagacuugagcugga

SEQ ID NO: 2511 - RNA, 19 nt, Artificial Sequence
  Description of Artificial Sequence: Synthetic oligonucleotide
auagagacuugagcuggau

SEQ ID NO: 2512 - RNA, 19 nt, Artificial Sequence
  Description of Artificial Sequence: Synthetic oligonucleotide
uagagacuugagcuggauc

SEQ ID NO: 2513 - RNA, 19 nt, Artificial Sequence
  Description of Artificial Sequence: Synthetic oligonucleotide
agagacuugagcuggaucu

SEQ ID NO: 2514 - RNA, 19 nt, Artificial Sequence
  Description of Artificial Sequence: Synthetic oligonucleotide
gagacuugagcuggaucug

SEQ ID NO: 2515 - RNA, 19 nt, Artificial Sequence
  Description of Artificial Sequence: Synthetic oligonucleotide
agacuugagcuggaucugu

SEQ ID NO: 2516 - RNA, 19 nt, Artificial Sequence
  Description of Artificial Sequence: Synthetic oligonucleotide
gacuugagcuggaucugua

SEQ ID NO: 2517 - RNA, 19 nt, Artificial Sequence
  Description of Artificial Sequence: Synthetic oligonucleotide
acuugagcuggaucuguac

SEQ ID NO: 2518 - RNA, 19 nt, Artificial Sequence
  Description of Artificial Sequence: Synthetic oligonucleotide
cuugagcuggaucuguacu

SEQ ID NO: 2519 - RNA, 19 nt, Artificial Sequence
  Description of Artificial Sequence: Synthetic oligonucleotide
uugagcuggaucuguacug

SEQ ID NO: 2520 - RNA, 19 nt, Artificial Sequence
  Description of Artificial Sequence: Synthetic oligonucleotide
ugagcuggaucuguacugc

SEQ ID NO: 2521 - RNA, 19 nt, Artificial Sequence
  Description of Artificial Sequence: Synthetic oligonucleotide
gagcuggaucuguacugca

SEQ ID NO: 2522 - RNA, 19 nt, Artificial Sequence
  Description of Artificial Sequence: Synthetic oligonucleotide
agcuggaucuguacugcac

SEQ ID NO: 2523 - RNA, 19 nt, Artificial Sequence
  Description of Artificial Sequence: Synthetic oligonucleotide
gcuggaucuguacugcacu

SEQ ID NO: 2524 - RNA, 19 nt, Artificial Sequence
  Description of Artificial Sequence: Synthetic oligonucleotide
cuggaucuguacugcacug

SEQ ID NO: 2525 - RNA, 19 nt, Artificial Sequence
  Description of Artificial Sequence: Synthetic oligonucleotide
uggaucuguacugcacugg

SEQ ID NO: 2526 - RNA, 19 nt, Artificial Sequence
  Description of Artificial Sequence: Synthetic oligonucleotide
ggaucuguacugcacugga

SEQ ID NO: 2527 - RNA, 19 nt, Artificial Sequence
  Description of Artificial Sequence: Synthetic oligonucleotide
gaucuguacugcacuggag

SEQ ID NO: 2528 - RNA, 19 nt, Artificial Sequence
  Description of Artificial Sequence: Synthetic oligonucleotide
aucuguacugcacuggagu

SEQ ID NO: 2529 - RNA, 19 nt, Artificial Sequence
  Description of Artificial Sequence: Synthetic oligonucleotide
ucuguacugcacuggagua

SEQ ID NO: 2530 - RNA, 19 nt, Artificial Sequence
  Description of Artificial Sequence: Synthetic oligonucleotide
cuguacugcacuggaguaa

SEQ ID NO: 2531 - RNA, 19 nt, Artificial Sequence
  Description of Artificial Sequence: Synthetic oligonucleotide
uguacugcacuggaguaag

SEQ ID NO: 2532 - RNA, 19 nt, Artificial Sequence
  Description of Artificial Sequence: Synthetic oligonucleotide
guacugcacuggaguaagc

SEQ ID NO: 2533 - RNA, 19 nt, Artificial Sequence
  Description of Artificial Sequence: Synthetic oligonucleotide
uacugcacuggaguaagca

SEQ ID NO: 2534 - RNA, 19 nt, Artificial Sequence
  Description of Artificial Sequence: Synthetic oligonucleotide
acugcacuggaguaagcaa

SEQ ID NO: 2535 - RNA, 19 nt, Artificial Sequence
  Description of Artificial Sequence: Synthetic oligonucleotide
cugcacuggaguaagcaag

SEQ ID NO: 2536 - RNA, 19 nt, Artificial Sequence
  Description of Artificial Sequence: Synthetic oligonucleotide
ugcacuggaguaagcaaga

SEQ ID NO: 2537 - RNA, 19 nt, Artificial Sequence
  Description of Artificial Sequence: Synthetic oligonucleotide
gcacuggaguaagcaagaa

SEQ ID NO: 2538 - RNA, 19 nt, Artificial Sequence
  Description of Artificial Sequence: Synthetic oligonucleotide
cacuggaguaagcaagaaa

SEQ ID NO: 2539 - RNA, 19 nt, Artificial Sequence
  Description of Artificial Sequence: Synthetic oligonucleotide
acuggaguaagcaagaaaa

SEQ ID NO: 2540 - RNA, 19 nt, Artificial Sequence
  Description of Artificial Sequence: Synthetic oligonucleotide
cuggaguaagcaagaaaau

SEQ ID NO: 2541 - RNA, 19 nt, Artificial Sequence
  Description of Artificial Sequence: Synthetic oligonucleotide
uggaguaagcaagaaaauu

SEQ ID NO: 2542 - RNA, 19 nt, Artificial Sequence
  Description of Artificial Sequence: Synthetic oligonucleotide
ggaguaagcaagaaaauug

SEQ ID NO: 2543 - RNA, 19 nt, Artificial Sequence
  Description of Artificial Sequence: Synthetic oligonucleotide
gaguaagcaagaaaauugg

SEQ ID NO: 2544 - RNA, 19 nt, Artificial Sequence
  Description of Artificial Sequence: Synthetic oligonucleotide
aguaagcaagaaaauuggg

SEQ ID NO: 2545 - RNA, 19 nt, Artificial Sequence
  Description of Artificial Sequence: Synthetic oligonucleotide
guaagcaagaaaauuggga

SEQ ID NO: 2546 - RNA, 19 nt, Artificial Sequence
  Description of Artificial Sequence: Synthetic oligonucleotide
uaagcaagaaaauugggaa

SEQ ID NO: 2547 - RNA, 19 nt, Artificial Sequence
  Description of Artificial Sequence: Synthetic oligonucleotide
aagcaagaaaauugggaaa

SEQ ID NO: 2548 - RNA, 19 nt, Artificial Sequence
  Description of Artificial Sequence: Synthetic oligonucleotide
agcaagaaaauugggaaaa

SEQ ID NO: 2549 - RNA, 19 nt, Artificial Sequence
  Description of Artificial Sequence: Synthetic oligonucleotide
gcaagaaaauugggaaaac

SEQ ID NO: 2550 - RNA, 19 nt, Artificial Sequence
  Description of Artificial Sequence: Synthetic oligonucleotide
caagaaaauugggaaaacu

SEQ ID NO: 2551 - RNA, 19 nt, Artificial Sequence
  Description of Artificial Sequence: Synthetic oligonucleotide
aagaaaauugggaaaacuu

SEQ ID NO: 2552 - RNA, 19 nt, Artificial Sequence
  Description of Artificial Sequence: Synthetic oligonucleotide
agaaaauugggaaaacuuu

SEQ ID NO: 2553 - RNA, 19 nt, Artificial Sequence
  Description of Artificial Sequence: Synthetic oligonucleotide
gaaaauugggaaaacuuuu

SEQ ID NO: 2554 - RNA, 19 nt, Artificial Sequence
  Description of Artificial Sequence: Synthetic oligonucleotide
aaaauugggaaaacuuuuu

SEQ ID NO: 2555 - RNA, 19 nt, Artificial Sequence
  Description of Artificial Sequence: Synthetic oligonucleotide
aaauugggaaaacuuuuuc

SEQ ID NO: 2556 - RNA, 19 nt, Artificial Sequence
  Description of Artificial Sequence: Synthetic oligonucleotide
aauugggaaaacuuuuucg

SEQ ID NO: 2557 - RNA, 19 nt, Artificial Sequence
  Description of Artificial Sequence: Synthetic oligonucleotide
auugggaaaacuuuuucgu

SEQ ID NO: 2558 - RNA, 19 nt, Artificial Sequence
  Description of Artificial Sequence: Synthetic oligonucleotide
uugggaaaacuuuuucguu

SEQ ID NO: 2559 - RNA, 19 nt, Artificial Sequence
  Description of Artificial Sequence: Synthetic oligonucleotide
ugggaaaacuuuuucguuu

SEQ ID NO: 2560 - RNA, 19 nt, Artificial Sequence
  Description of Artificial Sequence: Synthetic oligonucleotide
gggaaaacuuuuucguuug

SEQ ID NO: 2561 - RNA, 19 nt, Artificial Sequence
  Description of Artificial Sequence: Synthetic oligonucleotide
ggaaaacuuuuucguuugu

SEQ ID NO: 2562 - RNA, 19 nt, Artificial Sequence
  Description of Artificial Sequence: Synthetic oligonucleotide
gaaaacuuuuucguuuguu

SEQ ID NO: 2563 - RNA, 19 nt, Artificial Sequence
  Description of Artificial Sequence: Synthetic oligonucleotide
aaaacuuuuucguuuguuc

SEQ ID NO: 2564 - RNA, 19 nt, Artificial Sequence
  Description of Artificial Sequence: Synthetic oligonucleotide
aaacuuuuucguuuguuca

SEQ ID NO: 2565 - RNA, 19 nt, Artificial Sequence
  Description of Artificial Sequence: Synthetic oligonucleotide
aacuuuuucguuuguucag

SEQ ID NO: 2566 - RNA, 19 nt, Artificial Sequence
  Description of Artificial Sequence: Synthetic oligonucleotide
acuuuuucguuuguucagg

SEQ ID NO: 2567 - RNA, 19 nt, Artificial Sequence
  Description of Artificial Sequence: Synthetic oligonucleotide
cuuuuucguuuguucaggu

SEQ ID NO: 2568 - RNA, 19 nt, Artificial Sequence
  Description of Artificial Sequence: Synthetic oligonucleotide
uuuuucguuuguucagguu

SEQ ID NO: 2569 - RNA, 19 nt, Artificial Sequence
  Description of Artificial Sequence: Synthetic oligonucleotide
uuuucguuuguucagguuu

SEQ ID NO: 2570 - RNA, 19 nt, Artificial Sequence
  Description of Artificial Sequence: Synthetic oligonucleotide
uuucguuuguucagguuuu

SEQ ID NO: 2571 - RNA, 19 nt, Artificial Sequence
  Description of Artificial Sequence: Synthetic oligonucleotide
uucguuuguucagguuuug

SEQ ID NO: 2572 - RNA, 19 nt, Artificial Sequence
  Description of Artificial Sequence: Synthetic oligonucleotide
ucguuuguucagguuuugg

SEQ ID NO: 2573 - RNA, 19 nt, Artificial Sequence
  Description of Artificial Sequence: Synthetic oligonucleotide
cguuuguucagguuuuggc

SEQ ID NO: 2574 - RNA, 19 nt, Artificial Sequence
  Description of Artificial Sequence: Synthetic oligonucleotide
guuuguucagguuuuggca

SEQ ID NO: 2575 - RNA, 19 nt, Artificial Sequence
  Description of Artificial Sequence: Synthetic oligonucleotide
uuuguucagguuuuggcaa

SEQ ID NO: 2576 - RNA, 19 nt, Artificial Sequence
  Description of Artificial Sequence: Synthetic oligonucleotide
uuguucagguuuuggcaac

SEQ ID NO: 2577 - RNA, 19 nt, Artificial Sequence
  Description of Artificial Sequence: Synthetic oligonucleotide
uguucagguuuuggcaaca

SEQ ID NO: 2578 - RNA, 19 nt, Artificial Sequence
  Description of Artificial Sequence: Synthetic oligonucleotide
guucagguuuuggcaacac

SEQ ID NO: 2579 - RNA, 19 nt, Artificial Sequence
  Description of Artificial Sequence: Synthetic oligonucleotide
uucagguuuuggcaacaca

SEQ ID NO: 2580 - RNA, 19 nt, Artificial Sequence
  Description of Artificial Sequence: Synthetic oligonucleotide
ucagguuuuggcaacacau

SEQ ID NO: 2581 - RNA, 19 nt, Artificial Sequence
  Description of Artificial Sequence: Synthetic oligonucleotide
cagguuuuggcaacacaua

SEQ ID NO: 2582 - RNA, 19 nt, Artificial Sequence
  Description of Artificial Sequence: Synthetic oligonucleotide
agguuuuggcaacacauag

SEQ ID NO: 2583 - RNA, 19 nt, Artificial Sequence
  Description of Artificial Sequence: Synthetic oligonucleotide
gguuuuggcaacacauaga

SEQ ID NO: 2584 - RNA, 19 nt, Artificial Sequence
  Description of Artificial Sequence: Synthetic oligonucleotide
guuuuggcaacacauagau

SEQ ID NO: 2585 - RNA, 19 nt, Artificial Sequence
  Description of Artificial Sequence: Synthetic oligonucleotide
uuuuggcaacacauagauc

SEQ ID NO: 2586 - RNA, 19 nt, Artificial Sequence
  Description of Artificial Sequence: Synthetic oligonucleotide
uuuggcaacacauagauca

SEQ ID NO: 2587 - RNA, 19 nt, Artificial Sequence
  Description of Artificial Sequence: Synthetic oligonucleotide
uuggcaacacauagaucau

SEQ ID NO: 2588 - RNA, 19 nt, Artificial Sequence
  Description of Artificial Sequence: Synthetic oligonucleotide
uggcaacacauagaucaua

SEQ ID NO: 2589 - RNA, 19 nt, Artificial Sequence
  Description of Artificial Sequence: Synthetic oligonucleotide
ggcaacacauagaucauau

SEQ ID NO: 2590 - RNA, 19 nt, Artificial Sequence
  Description of Artificial Sequence: Synthetic oligonucleotide
gcaacacauagaucauaug

SEQ ID NO: 2591 - RNA, 19 nt, Artificial Sequence
  Description of Artificial Sequence: Synthetic oligonucleotide
caacacauagaucauaugu

SEQ ID NO: 2592 - RNA, 19 nt, Artificial Sequence
  Description of Artificial Sequence: Synthetic oligonucleotide
aacacauagaucauauguc

SEQ ID NO: 2593 - RNA, 19 nt, Artificial Sequence
  Description of Artificial Sequence: Synthetic oligonucleotide
acacauagaucauaugucu

SEQ ID NO: 2594 - RNA, 19 nt, Artificial Sequence
  Description of Artificial Sequence: Synthetic oligonucleotide
cacauagaucauaugucug

SEQ ID NO: 2595 - RNA, 19 nt, Artificial Sequence
  Description of Artificial Sequence: Synthetic oligonucleotide
acauagaucauaugucuga

SEQ ID NO: 2596 - RNA, 19 nt, Artificial Sequence
  Description of Artificial Sequence: Synthetic oligonucleotide
cauagaucauaugucugag

SEQ ID NO: 2597 - RNA, 19 nt, Artificial Sequence
  Description of Artificial Sequence: Synthetic oligonucleotide
auagaucauaugucugagg

SEQ ID NO: 2598 - RNA, 19 nt, Artificial Sequence
  Description of Artificial Sequence: Synthetic oligonucleotide
uagaucauaugucugaggc

SEQ ID NO: 2599 - RNA, 19 nt, Artificial Sequence
  Description of Artificial Sequence: Synthetic oligonucleotide
agaucauaugucugaggca

SEQ ID NO: 2600 - RNA, 19 nt, Artificial Sequence
  Description of Artificial Sequence: Synthetic oligonucleotide
gaucauaugucugaggcac

SEQ ID NO: 2601 - RNA, 19 nt, Artificial Sequence
  Description of Artificial Sequence: Synthetic oligonucleotide
aucauaugucugaggcaca

SEQ ID NO: 2602 - RNA, 19 nt, Artificial Sequence
  Description of Artificial Sequence: Synthetic oligonucleotide
ucauaugucugaggcacaa

SEQ ID NO: 2603 - RNA, 19 nt, Artificial Sequence
  Description of Artificial Sequence: Synthetic oligonucleotide
cauaugucugaggcacaag

SEQ ID NO: 2604 - RNA, 19 nt, Artificial Sequence
  Description of Artificial Sequence: Synthetic oligonucleotide
auaugucugaggcacaagu

SEQ ID NO: 2605 - RNA, 19 nt, Artificial Sequence
  Description of Artificial Sequence: Synthetic oligonucleotide
uaugucugaggcacaaguu

SEQ ID NO: 2606 - RNA, 19 nt, Artificial Sequence
  Description of Artificial Sequence: Synthetic oligonucleotide
augucugaggcacaaguug

SEQ ID NO: 2607 - RNA, 19 nt, Artificial Sequence
  Description of Artificial Sequence: Synthetic oligonucleotide
ugucugaggcacaaguugg

SEQ ID NO: 2608 - RNA, 19 nt, Artificial Sequence
  Description of Artificial Sequence: Synthetic oligonucleotide
gucugaggcacaaguuggc

SEQ ID NO: 2609 - RNA, 19 nt, Artificial Sequence
  Description of Artificial Sequence: Synthetic oligonucleotide
ucugaggcacaaguuggcu

SEQ ID NO: 2610 - RNA, 19 nt, Artificial Sequence
  Description of Artificial Sequence: Synthetic oligonucleotide
cugaggcacaaguuggcug

SEQ ID NO: 2611 - RNA, 19 nt, Artificial Sequence
  Description of Artificial Sequence: Synthetic oligonucleotide
ugaggcacaaguuggcugu

SEQ ID NO: 2612 - RNA, 19 nt, Artificial Sequence
  Description of Artificial Sequence: Synthetic oligonucleotide
gaggcacaaguuggcuguu

SEQ ID NO: 2613 - RNA, 19 nt, Artificial Sequence
  Description of Artificial Sequence: Synthetic oligonucleotide
aggcacaaguuggcuguuc

SEQ ID NO: 2614 - RNA, 19 nt, Artificial Sequence
  Description of Artificial Sequence: Synthetic oligonucleotide
ggcacaaguuggcuguuca

SEQ ID NO: 2615 - RNA, 19 nt, Artificial Sequence
  Description of Artificial Sequence: Synthetic oligonucleotide
gcacaaguuggcuguucau

SEQ ID NO: 2616 - RNA, 19 nt, Artificial Sequence
  Description of Artificial Sequence: Synthetic oligonucleotide
cacaaguuggcuguucauc

SEQ ID NO: 2617 - RNA, 19 nt, Artificial Sequence
  Description of Artificial Sequence: Synthetic oligonucleotide
acaaguuggcuguucaucu

SEQ ID NO: 2618 - RNA, 19 nt, Artificial Sequence
  Description of Artificial Sequence: Synthetic oligonucleotide
caaguuggcuguucaucuu

SEQ ID NO: 2619 - RNA, 19 nt, Artificial Sequence
  Description of Artificial Sequence: Synthetic oligonucleotide
aaguuggcuguucaucuuu

SEQ ID NO: 2620 - RNA, 19 nt, Artificial Sequence
  Description of Artificial Sequence: Synthetic oligonucleotide
aguuggcuguucaucuuug

SEQ ID NO: 2621 - RNA, 19 nt, Artificial Sequence
  Description of Artificial Sequence: Synthetic oligonucleotide
guuggcuguucaucuuuga

SEQ ID NO: 2622 - RNA, 19 nt, Artificial Sequence
  Description of Artificial Sequence: Synthetic oligonucleotide
uuggcuguucaucuuugaa

SEQ ID NO: 2623 - RNA, 19 nt, Artificial Sequence
  Description of Artificial Sequence: Synthetic oligonucleotide
uggcuguucaucuuugaaa

SEQ ID NO: 2624 - RNA, 19 nt, Artificial Sequence
  Description of Artificial Sequence: Synthetic oligonucleotide
ggcuguucaucuuugaaac

SEQ ID NO: 2625 - RNA, 19 nt, Artificial Sequence
  Description of Artificial Sequence: Synthetic oligonucleotide
gcuguucaucuuugaaacc

SEQ ID NO: 2626 - RNA, 19 nt, Artificial Sequence
  Description of Artificial Sequence: Synthetic oligonucleotide
cuguucaucuuugaaacca

SEQ ID NO: 2627 - RNA, 19 nt, Artificial Sequence
  Description of Artificial Sequence: Synthetic oligonucleotide
uguucaucuuugaaaccag

SEQ ID NO: 2628 - RNA, 19 nt, Artificial Sequence
  Description of Artificial Sequence: Synthetic oligonucleotide
guucaucuuugaaaccagg

SEQ ID NO: 2629 - RNA, 19 nt, Artificial Sequence
  Description of Artificial Sequence: Synthetic oligonucleotide
uucaucuuugaaaccaggg

SEQ ID NO: 2630 - RNA, 19 nt, Artificial Sequence
  Description of Artificial Sequence: Synthetic oligonucleotide
ucaucuuugaaaccagggg

SEQ ID NO: 2631 - RNA, 19 nt, Artificial Sequence
  Description of Artificial Sequence: Synthetic oligonucleotide
caucuuugaaaccagggga

SEQ ID NO: 2632 - RNA, 19 nt, Artificial Sequence
  Description of Artificial Sequence: Synthetic oligonucleotide
aucuuugaaaccaggggau

SEQ ID NO: 2633 - RNA, 19 nt, Artificial Sequence
  Description of Artificial Sequence: Synthetic oligonucleotide
ucuuugaaaccaggggaug

SEQ ID NO: 2634 - RNA, 19 nt, Artificial Sequence
  Description of Artificial Sequence: Synthetic oligonucleotide
cuuugaaaccaggggaugc

SEQ ID NO: 2635 - RNA, 19 nt, Artificial Sequence
  Description of Artificial Sequence: Synthetic oligonucleotide
uuugaaaccaggggaugca

SEQ ID NO: 2636 - RNA, 19 nt, Artificial Sequence
  Description of Artificial Sequence: Synthetic oligonucleotide
uugaaaccaggggaugcac

SEQ ID NO: 2637 - RNA, 19 nt, Artificial Sequence
  Description of Artificial Sequence: Synthetic oligonucleotide
ugaaaccaggggaugcaca

SEQ ID NO: 2638 - RNA, 19 nt, Artificial Sequence
  Description of Artificial Sequence: Synthetic oligonucleotide
gaaaccaggggaugcacag

SEQ ID NO: 2639 - RNA, 19 nt, Artificial Sequence
  Description of Artificial Sequence: Synthetic oligonucleotide
aaaccaggggaugcacagu

SEQ ID NO: 2640 - RNA, 19 nt, Artificial Sequence
  Description of Artificial Sequence: Synthetic oligonucleotide
aaccaggggaugcacaguc

SEQ ID NO: 2641 - RNA, 19 nt, Artificial Sequence
  Description of Artificial Sequence: Synthetic oligonucleotide
accaggggaugcacagucu

SEQ ID NO: 2642 - RNA, 19 nt, Artificial Sequence
  Description of Artificial Sequence: Synthetic oligonucleotide
ccaggggaugcacagucua

SEQ ID NO: 2643 - RNA, 19 nt, Artificial Sequence
  Description of Artificial Sequence: Synthetic oligonucleotide
caggggaugcacagucuaa

SEQ ID NO: 2644 - RNA, 19 nt, Artificial Sequence
  Description of Artificial Sequence: Synthetic oligonucleotide
aggggaugcacagucuaaa

SEQ ID NO: 2645 - RNA, 19 nt, Artificial Sequence
  Description of Artificial Sequence: Synthetic oligonucleotide
ggggaugcacagucuaaau

SEQ ID NO: 2646 - RNA, 19 nt, Artificial Sequence
  Description of Artificial Sequence: Synthetic oligonucleotide
gggaugcacagucuaaaug

SEQ ID NO: 2647 - RNA, 19 nt, Artificial Sequence
  Description of Artificial Sequence: Synthetic oligonucleotide
ggaugcacagucuaaauga

SEQ ID NO: 2648 - RNA, 19 nt, Artificial Sequence
  Description of Artificial Sequence: Synthetic oligonucleotide
gaugcacagucuaaaugaa

SEQ ID NO: 2649 - RNA, 19 nt, Artificial Sequence
  Description of Artificial Sequence: Synthetic oligonucleotide
augcacagucuaaaugaau

SEQ ID NO: 2650 - RNA, 19 nt, Artificial Sequence
  Description of Artificial Sequence: Synthetic oligonucleotide
ugcacagucuaaaugaaua

SEQ ID NO: 2651 - RNA, 19 nt, Artificial Sequence
  Description of Artificial Sequence: Synthetic oligonucleotide
gcacagucuaaaugaauau

SEQ ID NO: 2652 - RNA, 19 nt, Artificial Sequence
  Description of Artificial Sequence: Synthetic oligonucleotide
cacagucuaaaugaauauc

SEQ ID NO: 2653 - RNA, 19 nt, Artificial Sequence
  Description of Artificial Sequence: Synthetic oligonucleotide
acagucuaaaugaauaucu

SEQ ID NO: 2654 - RNA, 19 nt, Artificial Sequence
  Description of Artificial Sequence: Synthetic oligonucleotide
cagucuaaaugaauaucug

SEQ ID NO: 2655 - RNA, 19 nt, Artificial Sequence
  Description of Artificial Sequence: Synthetic oligonucleotide
agucuaaaugaauaucugc

SEQ ID NO: 2656 - RNA, 19 nt, Artificial Sequence
  Description of Artificial Sequence: Synthetic oligonucleotide
gucuaaaugaauaucugca

SEQ ID NO: 2657 - RNA, 19 nt, Artificial Sequence
  Description of Artificial Sequence: Synthetic oligonucleotide
ucuaaaugaauaucugcau

SEQ ID NO: 2658 - RNA, 19 nt, Artificial Sequence
  Description of Artificial Sequence: Synthetic oligonucleotide
cuaaaugaauaucugcaug

SEQ ID NO: 2659 - RNA, 19 nt, Artificial Sequence
  Description of Artificial Sequence: Synthetic oligonucleotide
uaaaugaauaucugcaugg

SEQ ID NO: 2660 - RNA, 19 nt, Artificial Sequence
  Description of Artificial Sequence: Synthetic oligonucleotide
aaaugaauaucugcauggg

SEQ ID NO: 2661 - RNA, 19 nt, Artificial Sequence
  Description of Artificial Sequence: Synthetic oligonucleotide
aaugaauaucugcauggga

SEQ ID NO: 2662 - RNA, 19 nt, Artificial Sequence
  Description of Artificial Sequence: Synthetic oligonucleotide
augaauaucugcaugggau

SEQ ID NO: 2663 - RNA, 19 nt, Artificial Sequence
  Description of Artificial Sequence: Synthetic oligonucleotide
ugaauaucugcaugggauu

SEQ ID NO: 2664 - RNA, 19 nt, Artificial Sequence
  Description of Artificial Sequence: Synthetic oligonucleotide
gaauaucugcaugggauuu

SEQ ID NO: 2665 - RNA, 19 nt, Artificial Sequence
  Description of Artificial Sequence: Synthetic oligonucleotide
aauaucugcaugggauuug

SEQ ID NO: 2666 - RNA, 19 nt, Artificial Sequence
  Description of Artificial Sequence: Synthetic oligonucleotide
auaucugcaugggauuugc

SEQ ID NO: 2667 - RNA, 19 nt, Artificial Sequence
  Description of Artificial Sequence: Synthetic oligonucleotide
uaucugcaugggauuugcu

SEQ ID NO: 2668 - RNA, 19 nt, Artificial Sequence
  Description of Artificial Sequence: Synthetic oligonucleotide
aucugcaugggauuugcua

SEQ ID NO: 2669 - RNA, 19 nt, Artificial Sequence
  Description of Artificial Sequence: Synthetic oligonucleotide
ucugcaugggauuugcuau

SEQ ID NO: 2670 - RNA, 19 nt, Artificial Sequence
  Description of Artificial Sequence: Synthetic oligonucleotide
cugcaugggauuugcuauc

SEQ ID NO: 2671 - RNA, 19 nt, Artificial Sequence
  Description of Artificial Sequence: Synthetic oligonucleotide
ugcaugggauuugcuauca

SEQ ID NO: 2672 - RNA, 19 nt, Artificial Sequence
  Description of Artificial Sequence: Synthetic oligonucleotide
gcaugggauuugcuaucau

SEQ ID NO: 2673 - RNA, 19 nt, Artificial Sequence
  Description of Artificial Sequence: Synthetic oligonucleotide
caugggauuugcuaucaua

SEQ ID NO: 2674 - RNA, 19 nt, Artificial Sequence
  Description of Artificial Sequence: Synthetic oligonucleotide
augggauuugcuaucauaa

SEQ ID NO: 2675 - RNA, 19 nt, Artificial Sequence
  Description of Artificial Sequence: Synthetic oligonucleotide
ugggauuugcuaucauaau

SEQ ID NO: 2676 - RNA, 19 nt, Artificial Sequence
  Description of Artificial Sequence: Synthetic oligonucleotide
gggauuugcuaucauaaua

SEQ ID NO: 2677 - RNA, 19 nt, Artificial Sequence
  Description of Artificial Sequence: Synthetic oligonucleotide
ggauuugcuaucauaauau

SEQ ID NO: 2678 - RNA, 19 nt, Artificial Sequence
  Description of Artificial Sequence: Synthetic oligonucleotide
gauuugcuaucauaauauu

SEQ ID NO: 2679 - RNA, 19 nt, Artificial Sequence
  Description of Artificial Sequence: Synthetic oligonucleotide
auuugcuaucauaauauuu

SEQ ID NO: 2680 - RNA, 19 nt, Artificial Sequence
  Description of Artificial Sequence: Synthetic oligonucleotide
uuugcuaucauaauauuua

SEQ ID NO: 2681 - RNA, 19 nt, Artificial Sequence
  Description of Artificial Sequence: Synthetic oligonucleotide
uugcuaucauaauauuuac

SEQ ID NO: 2682 - RNA, 19 nt, Artificial Sequence
  Description of Artificial Sequence: Synthetic oligonucleotide
ugcuaucauaauauuuacu

SEQ ID NO: 2683 - RNA, 19 nt, Artificial Sequence
  Description of Artificial Sequence: Synthetic oligonucleotide
gcuaucauaauauuuacua

SEQ ID NO: 2684 - RNA, 19 nt, Artificial Sequence
  Description of Artificial Sequence: Synthetic oligonucleotide
cuaucauaauauuuacuau

SEQ ID NO: 2685 - RNA, 19 nt, Artificial Sequence
  Description of Artificial Sequence: Synthetic oligonucleotide
uaucauaauauuuacuaug

SEQ ID NO: 2686 - RNA, 19 nt, Artificial Sequence
  Description of Artificial Sequence: Synthetic oligonucleotide
aucauaauauuuacuaugc

SEQ ID NO: 2687 - RNA, 19 nt, Artificial Sequence
  Description of Artificial Sequence: Synthetic oligonucleotide
ucauaauauuuacuaugca

SEQ ID NO: 2688 - RNA, 19 nt, Artificial Sequence
  Description of Artificial Sequence: Synthetic oligonucleotide
cauaauauuuacuaugcag

SEQ ID NO: 2689 - RNA, 19 nt, Artificial Sequence
  Description of Artificial Sequence: Synthetic oligonucleotide
auaauauuuacuaugcaga

SEQ ID NO: 2690 - RNA, 19 nt, Artificial Sequence
  Description of Artificial Sequence: Synthetic oligonucleotide
uaauauuuacuaugcagau

SEQ ID NO: 2691 - RNA, 19 nt, Artificial Sequence
  Description of Artificial Sequence: Synthetic oligonucleotide
aauauuuacuaugcagaug

SEQ ID NO: 2692 - RNA, 19 nt, Artificial Sequence
  Description of Artificial Sequence: Synthetic oligonucleotide
auauuuacuaugcagauga

SEQ ID NO: 2693 - RNA, 19 nt, Artificial Sequence
  Description of Artificial Sequence: Synthetic oligonucleotide
uauuuacuaugcagaugaa

SEQ ID NO: 2694 - RNA, 19 nt, Artificial Sequence
  Description of Artificial Sequence: Synthetic oligonucleotide
auuuacuaugcagaugaau

SEQ ID NO: 2695 - RNA, 19 nt, Artificial Sequence
  Description of Artificial Sequence: Synthetic oligonucleotide
uuuacuaugcagaugaauu

SEQ ID NO: 2696 - RNA, 19 nt, Artificial Sequence
  Description of Artificial Sequence: Synthetic oligonucleotide
uuacuaugcagaugaauuc

SEQ ID NO: 2697 - RNA, 19 nt, Artificial Sequence
  Description of Artificial Sequence: Synthetic oligonucleotide
uacuaugcagaugaauuca

SEQ ID NO: 2698 - RNA, 19 nt, Artificial Sequence
  Description of Artificial Sequence: Synthetic oligonucleotide
acuaugcagaugaauucag

SEQ ID NO: 2699 - RNA, 19 nt, Artificial Sequence
  Description of Artificial Sequence: Synthetic oligonucleotide
cuaugcagaugaauucagu

SEQ ID NO: 2700 - RNA, 19 nt, Artificial Sequence
  Description of Artificial Sequence: Synthetic oligonucleotide
uaugcagaugaauucagug

SEQ ID NO: 2701 - RNA, 19 nt, Artificial Sequence
  Description of Artificial Sequence: Synthetic oligonucleotide
augcagaugaauucagugu

SEQ ID NO: 2702 - RNA, 19 nt, Artificial Sequence
  Description of Artificial Sequence: Synthetic oligonucleotide
ugcagaugaauucagugug

SEQ ID NO: 2703 - RNA, 19 nt, Artificial Sequence
  Description of Artificial Sequence: Synthetic oligonucleotide
gcagaugaauucaguguga

SEQ ID NO: 2704 - RNA, 19 nt, Artificial Sequence
  Description of Artificial Sequence: Synthetic oligonucleotide
cagaugaauucagugugag

SEQ ID NO: 2705 - RNA, 19 nt, Artificial Sequence
  Description of Artificial Sequence: Synthetic oligonucleotide
agaugaauucagugugagg

SEQ ID NO: 2706 - RNA, 19 nt, Artificial Sequence
  Description of Artificial Sequence: Synthetic oligonucleotide
gaugaauucagugugaggu

SEQ ID NO: 2707 - RNA, 19 nt, Artificial Sequence
  Description of Artificial Sequence: Synthetic oligonucleotide
augaauucagugugagguc

SEQ ID NO: 2708 - RNA, 19 nt, Artificial Sequence
  Description of Artificial Sequence: Synthetic oligonucleotide
ugaauucagugugaggucc

SEQ ID NO: 2709 - RNA, 19 nt, Artificial Sequence
  Description of Artificial Sequence: Synthetic oligonucleotide
gaauucagugugagguccu

SEQ ID NO: 2710 - RNA, 19 nt, Artificial Sequence
  Description of Artificial Sequence: Synthetic oligonucleotide
aauucagugugagguccug

SEQ ID NO: 2711 - RNA, 19 nt, Artificial Sequence
  Description of Artificial Sequence: Synthetic oligonucleotide
auucagugugagguccugu

SEQ ID NO: 2712 - RNA, 19 nt, Artificial Sequence
  Description of Artificial Sequence: Synthetic oligonucleotide
uucagugugagguccugug

SEQ ID NO: 2713 - RNA, 19 nt, Artificial Sequence
  Description of Artificial Sequence: Synthetic oligonucleotide
ucagugugagguccugugu

SEQ ID NO: 2714 - RNA, 19 nt, Artificial Sequence
  Description of Artificial Sequence: Synthetic oligonucleotide
cagugugagguccuguguc

SEQ ID NO: 2715 - RNA, 19 nt, Artificial Sequence
  Description of Artificial Sequence: Synthetic oligonucleotide
agugugagguccugugucc

SEQ ID NO: 2716 - RNA, 19 nt, Artificial Sequence
  Description of Artificial Sequence: Synthetic oligonucleotide
gugugagguccuguguccg

SEQ ID NO: 2717 - RNA, 19 nt, Artificial Sequence
  Description of Artificial Sequence: Synthetic oligonucleotide
ugugagguccuguguccgu

SEQ ID NO: 2718 - RNA, 19 nt, Artificial Sequence
  Description of Artificial Sequence: Synthetic oligonucleotide
gugagguccuguguccgua

SEQ ID NO: 2719 - RNA, 19 nt, Artificial Sequence
  Description of Artificial Sequence: Synthetic oligonucleotide
ugagguccuguguccguac

SEQ ID NO: 2720 - RNA, 19 nt, Artificial Sequence
  Description of Artificial Sequence: Synthetic oligonucleotide
gagguccuguguccguacu

SEQ ID NO: 2721 - RNA, 19 nt, Artificial Sequence
  Description of Artificial Sequence: Synthetic oligonucleotide
agguccuguguccguacua

SEQ ID NO: 2722 - RNA, 19 nt, Artificial Sequence
  Description of Artificial Sequence: Synthetic oligonucleotide
gguccuguguccguacuau

SEQ ID NO: 2723 - RNA, 19 nt, Artificial Sequence
  Description of Artificial Sequence: Synthetic oligonucleotide
guccuguguccguacuauc

SEQ ID NO: 2724 - RNA, 19 nt, Artificial Sequence
  Description of Artificial Sequence: Synthetic oligonucleotide
uccuguguccguacuaucc

SEQ ID NO: 2725 - RNA, 19 nt, Artificial Sequence
  Description of Artificial Sequence: Synthetic oligonucleotide
ccuguguccguacuauccu

SEQ ID NO: 2726 - RNA, 19 nt, Artificial Sequence
  Description of Artificial Sequence: Synthetic oligonucleotide
cuguguccguacuauccuc

SEQ ID NO: 2727 - RNA, 19 nt, Artificial Sequence
  Description of Artificial Sequence: Synthetic oligonucleotide
uguguccguacuauccuca

SEQ ID NO: 2728 - RNA, 19 nt, Artificial Sequence
  Description of Artificial Sequence: Synthetic oligonucleotide
guguccguacuauccucaa

SEQ ID NO: 2729 - RNA, 19 nt, Artificial Sequence
  Description of Artificial Sequence: Synthetic oligonucleotide
uguccguacuauccucaaa

SEQ ID NO: 2730 - RNA, 19 nt, Artificial Sequence
  Description of Artificial Sequence: Synthetic oligonucleotide
guccguacuauccucaaau

SEQ ID NO: 2731 - RNA, 19 nt, Artificial Sequence
  Description of Artificial Sequence: Synthetic oligonucleotide
uccguacuauccucaaauu

SEQ ID NO: 2732 - RNA, 19 nt, Artificial Sequence
  Description of Artificial Sequence: Synthetic oligonucleotide
ccguacuauccucaaauua

SEQ ID NO: 2733 - RNA, 19 nt, Artificial Sequence
  Description of Artificial Sequence: Synthetic oligonucleotide
cguacuauccucaaauuau

SEQ ID NO: 2734 - RNA, 19 nt, Artificial Sequence
  Description of Artificial Sequence: Synthetic oligonucleotide
guacuauccucaaauuauu

SEQ ID NO: 2735 - RNA, 19 nt, Artificial Sequence
  Description of Artificial Sequence: Synthetic oligonucleotide
uacuauccucaaauuauuu

SEQ ID NO: 2736 - RNA, 19 nt, Artificial Sequence
  Description of Artificial Sequence: Synthetic oligonucleotide
acuauccucaaauuauuua

SEQ ID NO: 2737 - RNA, 19 nt, Artificial Sequence
  Description of Artificial Sequence: Synthetic oligonucleotide
cuauccucaaauuauuuau

SEQ ID NO: 2738 - RNA, 19 nt, Artificial Sequence
  Description of Artificial Sequence: Synthetic oligonucleotide
uauccucaaauuauuuauu

SEQ ID NO: 2739 - RNA, 19 nt, Artificial Sequence
  Description of Artificial Sequence: Synthetic oligonucleotide
auccucaaauuauuuauuu

SEQ ID NO: 2740 - RNA, 19 nt, Artificial Sequence
  Description of Artificial Sequence: Synthetic oligonucleotide
uccucaaauuauuuauuuu

SEQ ID NO: 2741 - RNA, 19 nt, Artificial Sequence
  Description of Artificial Sequence: Synthetic oligonucleotide
ccucaaauuauuuauuuua

SEQ ID NO: 2742 - RNA, 19 nt, Artificial Sequence
  Description of Artificial Sequence: Synthetic oligonucleotide
cucaaauuauuuauuuuau

SEQ ID NO: 2743 - RNA, 19 nt, Artificial Sequence
  Description of Artificial Sequence: Synthetic oligonucleotide
ucaaauuauuuauuuuaua

SEQ ID NO: 2744 - RNA, 19 nt, Artificial Sequence
  Description of Artificial Sequence: Synthetic oligonucleotide
caaauuauuuauuuuauag

SEQ ID NO: 2745 - RNA, 19 nt, Artificial Sequence
  Description of Artificial Sequence: Synthetic oligonucleotide
aaauuauuuauuuuauagu

SEQ ID NO: 2746 - RNA, 19 nt, Artificial Sequence
  Description of Artificial Sequence: Synthetic oligonucleotide
aauuauuuauuuuauagug

SEQ ID NO: 2747 - RNA, 19 nt, Artificial Sequence
  Description of Artificial Sequence: Synthetic oligonucleotide
auuauuuauuuuauagugc

SEQ ID NO: 2748 - RNA, 19 nt, Artificial Sequence
  Description of Artificial Sequence: Synthetic oligonucleotide
uuauuuauuuuauagugcu

SEQ ID NO: 2749 - RNA, 19 nt, Artificial Sequence
  Description of Artificial Sequence: Synthetic oligonucleotide
uauuuauuuuauagugcug

SEQ ID NO: 2750 - RNA, 19 nt, Artificial Sequence
  Description of Artificial Sequence: Synthetic oligonucleotide
auuuauuuuauagugcuga

SEQ ID NO: 2751 - RNA, 19 nt, Artificial Sequence
  Description of Artificial Sequence: Synthetic oligonucleotide
uuuauuuuauagugcugag

SEQ ID NO: 2752 - RNA, 19 nt, Artificial Sequence
  Description of Artificial Sequence: Synthetic oligonucleotide
uuauuuuauagugcugaga

SEQ ID NO: 2753 - RNA, 19 nt, Artificial Sequence
  Description of Artificial Sequence: Synthetic oligonucleotide
uauuuuauagugcugagau

SEQ ID NO: 2754 - RNA, 19 nt, Artificial Sequence
  Description of Artificial Sequence: Synthetic oligonucleotide
auuuuauagugcugagauc

SEQ ID NO: 2755 - RNA, 19 nt, Artificial Sequence
  Description of Artificial Sequence: Synthetic oligonucleotide
uuuuauagugcugagaucc

SEQ ID NO: 2756 - RNA, 19 nt, Artificial Sequence
  Description of Artificial Sequence: Synthetic oligonucleotide
uuuauagugcugagauccu

SEQ ID NO: 2757 - RNA, 19 nt, Artificial Sequence
  Description of Artificial Sequence: Synthetic oligonucleotide
uuauagugcugagauccuc

SEQ ID NO: 2758 - RNA, 19 nt, Artificial Sequence
  Description of Artificial Sequence: Synthetic oligonucleotide
uauagugcugagauccuca

SEQ ID NO: 2759 - RNA, 19 nt, Artificial Sequence
  Description of Artificial Sequence: Synthetic oligonucleotide
auagugcugagauccucaa

SEQ ID NO: 2760 - RNA, 19 nt, Artificial Sequence
  Description of Artificial Sequence: Synthetic oligonucleotide
uagugcugagauccucaaa

SEQ ID NO: 2761 - RNA, 19 nt, Artificial Sequence
  Description of Artificial Sequence: Synthetic oligonucleotide
agugcugagauccucaaau

SEQ ID NO: 2762 - RNA, 19 nt, Artificial Sequence
  Description of Artificial Sequence: Synthetic oligonucleotide
gugcugagauccucaaaua

SEQ ID NO: 2763 - RNA, 19 nt, Artificial Sequence
  Description of Artificial Sequence: Synthetic oligonucleotide
ugcugagauccucaaauaa

SEQ ID NO: 2764 - RNA, 19 nt, Artificial Sequence
  Description of Artificial Sequence: Synthetic oligonucleotide
gcugagauccucaaauaau

SEQ ID NO: 2765 - RNA, 19 nt, Artificial Sequence
  Description of Artificial Sequence: Synthetic oligonucleotide
cugagauccucaaauaauc

SEQ ID NO: 2766 - RNA, 19 nt, Artificial Sequence
  Description of Artificial Sequence: Synthetic oligonucleotide
ugagauccucaaauaaucu

SEQ ID NO: 2767 - RNA, 19 nt, Artificial Sequence
  Description of Artificial Sequence: Synthetic oligonucleotide
gagauccucaaauaaucuc

SEQ ID NO: 2768 - RNA, 19 nt, Artificial Sequence
  Description of Artificial Sequence: Synthetic oligonucleotide
agauccucaaauaaucuca

SEQ ID NO: 2769 - RNA, 19 nt, Artificial Sequence
  Description of Artificial Sequence: Synthetic oligonucleotide
gauccucaaauaaucucaa

SEQ ID NO: 2770 - RNA, 19 nt, Artificial Sequence
  Description of Artificial Sequence: Synthetic oligonucleotide
auccucaaauaaucucaau

SEQ ID NO: 2771 - RNA, 19 nt, Artificial Sequence
  Description of Artificial Sequence: Synthetic oligonucleotide
uccucaaauaaucucaauu

SEQ ID NO: 2772 - RNA, 19 nt, Artificial Sequence
  Description of Artificial Sequence: Synthetic oligonucleotide
ccucaaauaaucucaauuu

SEQ ID NO: 2773 - RNA, 19 nt, Artificial Sequence
  Description of Artificial Sequence: Synthetic oligonucleotide
cucaaauaaucucaauuuc

SEQ ID NO: 2774 - RNA, 19 nt, Artificial Sequence
  Description of Artificial Sequence: Synthetic oligonucleotide
ucaaauaaucucaauuuca

SEQ ID NO: 2775 - RNA, 19 nt, Artificial Sequence
  Description of Artificial Sequence: Synthetic oligonucleotide
caaauaaucucaauuucag

SEQ ID NO: 2776 - RNA, 19 nt, Artificial Sequence
  Description of Artificial Sequence: Synthetic oligonucleotide
aaauaaucucaauuucagg

SEQ ID NO: 2777 - RNA, 19 nt, Artificial Sequence
  Description of Artificial Sequence: Synthetic oligonucleotide
aauaaucucaauuucagga

SEQ ID NO: 2778 - RNA, 19 nt, Artificial Sequence
  Description of Artificial Sequence: Synthetic oligonucleotide
auaaucucaauuucaggag

SEQ ID NO: 2779 - RNA, 19 nt, Artificial Sequence
  Description of Artificial Sequence: Synthetic oligonucleotide
uaaucucaauuucaggagg

SEQ ID NO: 2780 - RNA, 19 nt, Artificial Sequence
  Description of Artificial Sequence: Synthetic oligonucleotide
aaucucaauuucaggaggu

SEQ ID NO: 2781 - RNA, 19 nt, Artificial Sequence
  Description of Artificial Sequence: Synthetic oligonucleotide
aucucaauuucaggagguu

SEQ ID NO: 2782 - RNA, 19 nt, Artificial Sequence
  Description of Artificial Sequence: Synthetic oligonucleotide
ucucaauuucaggagguuu

SEQ ID NO: 2783 - RNA, 19 nt, Artificial Sequence
  Description of Artificial Sequence: Synthetic oligonucleotide
cucaauuucaggagguuuc

SEQ ID NO: 2784 - RNA, 19 nt, Artificial Sequence
  Description of Artificial Sequence: Synthetic oligonucleotide
ucaauuucaggagguuuca

SEQ ID NO: 2785 - RNA, 19 nt, Artificial Sequence
  Description of Artificial Sequence: Synthetic oligonucleotide
caauuucaggagguuucac

SEQ ID NO: 2786 - RNA, 19 nt, Artificial Sequence
  Description of Artificial Sequence: Synthetic oligonucleotide
aauuucaggagguuucaca

SEQ ID NO: 2787 - RNA, 19 nt, Artificial Sequence
  Description of Artificial Sequence: Synthetic oligonucleotide
auuucaggagguuucacaa

SEQ ID NO: 2788 - RNA, 19 nt, Artificial Sequence
  Description of Artificial Sequence: Synthetic oligonucleotide
uuucaggagguuucacaaa

SEQ ID NO: 2789 - RNA, 19 nt, Artificial Sequence
  Description of Artificial Sequence: Synthetic oligonucleotide
uucaggagguuucacaaaa

SEQ ID NO: 2790 - RNA, 19 nt, Artificial Sequence
  Description of Artificial Sequence: Synthetic oligonucleotide
ucaggagguuucacaaaau

SEQ ID NO: 2791 - RNA, 19 nt, Artificial Sequence
  Description of Artificial Sequence: Synthetic oligonucleotide
caggagguuucacaaaaug

SEQ ID NO: 2792 - RNA, 19 nt, Artificial Sequence
  Description of Artificial Sequence: Synthetic oligonucleotide
aggagguuucacaaaaugg

SEQ ID NO: 2793 - RNA, 19 nt, Artificial Sequence
  Description of Artificial Sequence: Synthetic oligonucleotide
ggagguuucacaaaaugga

SEQ ID NO: 2794 - RNA, 19 nt, Artificial Sequence
  Description of Artificial Sequence: Synthetic oligonucleotide
gagguuucacaaaauggac

SEQ ID NO: 2795 - RNA, 19 nt, Artificial Sequence
  Description of Artificial Sequence: Synthetic oligonucleotide
agguuucacaaaauggacu

SEQ ID NO: 2796 - RNA, 19 nt, Artificial Sequence
  Description of Artificial Sequence: Synthetic oligonucleotide
gguuucacaaaauggacuc

SEQ ID NO: 2797 - RNA, 19 nt, Artificial Sequence
  Description of Artificial Sequence: Synthetic oligonucleotide
guuucacaaaauggacucc

SEQ ID NO: 2798 - RNA, 19 nt, Artificial Sequence
  Description of Artificial Sequence: Synthetic oligonucleotide
uuucacaaaauggacuccu

SEQ ID NO: 2799 - RNA, 19 nt, Artificial Sequence
  Description of Artificial Sequence: Synthetic oligonucleotide
uucacaaaauggacuccug

SEQ ID NO: 2800 - RNA, 19 nt, Artificial Sequence
  Description of Artificial Sequence: Synthetic oligonucleotide
ucacaaaauggacuccuga

SEQ ID NO: 2801 - RNA, 19 nt, Artificial Sequence
  Description of Artificial Sequence: Synthetic oligonucleotide
cacaaaauggacuccugaa

SEQ ID NO: 2802 - RNA, 19 nt, Artificial Sequence
  Description of Artificial Sequence: Synthetic oligonucleotide
acaaaauggacuccugaag

SEQ ID NO: 2803 - RNA, 19 nt, Artificial Sequence
  Description of Artificial Sequence: Synthetic oligonucleotide
caaaauggacuccugaagu

SEQ ID NO: 2804 - RNA, 19 nt, Artificial Sequence
  Description of Artificial Sequence: Synthetic oligonucleotide
aaaauggacuccugaagua

SEQ ID NO: 2805 - RNA, 19 nt, Artificial Sequence
  Description of Artificial Sequence: Synthetic oligonucleotide
aaauggacuccugaaguag

SEQ ID NO: 2806 - RNA, 19 nt, Artificial Sequence
  Description of Artificial Sequence: Synthetic oligonucleotide
aauggacuccugaaguaga

SEQ ID NO: 2807 - RNA, 19 nt, Artificial Sequence
  Description of Artificial Sequence: Synthetic oligonucleotide
auggacuccugaaguagac

SEQ ID NO: 2808 - RNA, 19 nt, Artificial Sequence
  Description of Artificial Sequence: Synthetic oligonucleotide
uggacuccugaaguagaca

SEQ ID NO: 2809 - RNA, 19 nt, Artificial Sequence
  Description of Artificial Sequence: Synthetic oligonucleotide
ggacuccugaaguagacag

SEQ ID NO: 2810 - RNA, 19 nt, Artificial Sequence
  Description of Artificial Sequence: Synthetic oligonucleotide
gacuccugaaguagacaga

SEQ ID NO: 2811 - RNA, 19 nt, Artificial Sequence
  Description of Artificial Sequence: Synthetic oligonucleotide
acuccugaaguagacagag

SEQ ID NO: 2812 - RNA, 19 nt, Artificial Sequence
  Description of Artificial Sequence: Synthetic oligonucleotide
cuccugaaguagacagagu

SEQ ID NO: 2813 - RNA, 19 nt, Artificial Sequence
  Description of Artificial Sequence: Synthetic oligonucleotide
uccugaaguagacagagua

SEQ ID NO: 2814 - RNA, 19 nt, Artificial Sequence
  Description of Artificial Sequence: Synthetic oligonucleotide
ccugaaguagacagaguag

SEQ ID NO: 2815 - RNA, 19 nt, Artificial Sequence
  Description of Artificial Sequence: Synthetic oligonucleotide
cugaaguagacagaguagu

SEQ ID NO: 2816 - RNA, 19 nt, Artificial Sequence
  Description of Artificial Sequence: Synthetic oligonucleotide
ugaaguagacagaguagug

SEQ ID NO: 2817 - RNA, 19 nt, Artificial Sequence
  Description of Artificial Sequence: Synthetic oligonucleotide
gaaguagacagaguaguga

SEQ ID NO: 2818 - RNA, 19 nt, Artificial Sequence
  Description of Artificial Sequence: Synthetic oligonucleotide
aaguagacagaguagugag

SEQ ID NO: 2819 - RNA, 19 nt, Artificial Sequence
  Description of Artificial Sequence: Synthetic oligonucleotide
aguagacagaguagugagg

SEQ ID NO: 2820 - RNA, 19 nt, Artificial Sequence
  Description of Artificial Sequence: Synthetic oligonucleotide
guagacagaguagugaggu

SEQ ID NO: 2821 - RNA, 19 nt, Artificial Sequence
  Description of Artificial Sequence: Synthetic oligonucleotide
uagacagaguagugagguu

SEQ ID NO: 2822 - RNA, 19 nt, Artificial Sequence
  Description of Artificial Sequence: Synthetic oligonucleotide
agacagaguagugagguuu

SEQ ID NO: 2823 - RNA, 19 nt, Artificial Sequence
  Description of Artificial Sequence: Synthetic oligonucleotide
gacagaguagugagguuuc

SEQ ID NO: 2824 - RNA, 19 nt, Artificial Sequence
  Description of Artificial Sequence: Synthetic oligonucleotide
acagaguagugagguuuca

SEQ ID NO: 2825 - RNA, 19 nt, Artificial Sequence
  Description of Artificial Sequence: Synthetic oligonucleotide
cagaguagugagguuucau

SEQ ID NO: 2826 - RNA, 19 nt, Artificial Sequence
  Description of Artificial Sequence: Synthetic oligonucleotide
agaguagugagguuucauu

SEQ ID NO: 2827 - RNA, 19 nt, Artificial Sequence
  Description of Artificial Sequence: Synthetic oligonucleotide
gaguagugagguuucauug

SEQ ID NO: 2828 - RNA, 19 nt, Artificial Sequence
  Description of Artificial Sequence: Synthetic oligonucleotide
aguagugagguuucauugc

SEQ ID NO: 2829 - RNA, 19 nt, Artificial Sequence
  Description of Artificial Sequence: Synthetic oligonucleotide
guagugagguuucauugcc

SEQ ID NO: 2830 - RNA, 19 nt, Artificial Sequence
  Description of Artificial Sequence: Synthetic oligonucleotide
uagugagguuucauugccc

SEQ ID NO: 2831 - RNA, 19 nt, Artificial Sequence
  Description of Artificial Sequence: Synthetic oligonucleotide
agugagguuucauugcccu

SEQ ID NO: 2832 - RNA, 19 nt, Artificial Sequence
  Description of Artificial Sequence: Synthetic oligonucleotide
gugagguuucauugcccuc

SEQ ID NO: 2833 - RNA, 19 nt, Artificial Sequence
  Description of Artificial Sequence: Synthetic oligonucleotide
ugagguuucauugcccucu

SEQ ID NO: 2834 - RNA, 19 nt, Artificial Sequence
  Description of Artificial Sequence: Synthetic oligonucleotide
gagguuucauugcccucua

SEQ ID NO: 2835 - RNA, 19 nt, Artificial Sequence
  Description of Artificial Sequence: Synthetic oligonucleotide
agguuucauugcccucuau

SEQ ID NO: 2836 - RNA, 19 nt, Artificial Sequence
  Description of Artificial Sequence: Synthetic oligonucleotide
gguuucauugcccucuaua

SEQ ID NO: 2837 - RNA, 19 nt, Artificial Sequence
  Description of Artificial Sequence: Synthetic oligonucleotide
guuucauugcccucuauaa

SEQ ID NO: 2838 - RNA, 19 nt, Artificial Sequence
  Description of Artificial Sequence: Synthetic oligonucleotide
uuucauugcccucuauaag

SEQ ID NO: 2839 - RNA, 19 nt, Artificial Sequence
  Description of Artificial Sequence: Synthetic oligonucleotide
uucauugcccucuauaagc

SEQ ID NO: 2840 - RNA, 19 nt, Artificial Sequence
  Description of Artificial Sequence: Synthetic oligonucleotide
ucauugcccucuauaagcu

SEQ ID NO: 2841 - RNA, 19 nt, Artificial Sequence
  Description of Artificial Sequence: Synthetic oligonucleotide
cauugcccucuauaagcuu

SEQ ID NO: 2842 - RNA, 19 nt, Artificial Sequence
  Description of Artificial Sequence: Synthetic oligonucleotide
auugcccucuauaagcuuc

SEQ ID NO: 2843 - RNA, 19 nt, Artificial Sequence
  Description of Artificial Sequence: Synthetic oligonucleotide
uugcccucuauaagcuucu

SEQ ID NO: 2844 - RNA, 19 nt, Artificial Sequence
  Description of Artificial Sequence: Synthetic oligonucleotide
ugcccucuauaagcuucug

SEQ ID NO: 2845 - RNA, 19 nt, Artificial Sequence
  Description of Artificial Sequence: Synthetic oligonucleotide
gcccucuauaagcuucuga

SEQ ID NO: 2846 - RNA, 19 nt, Artificial Sequence
  Description of Artificial Sequence: Synthetic oligonucleotide
cccucuauaagcuucugac

SEQ ID NO: 2847 - RNA, 19 nt, Artificial Sequence
  Description of Artificial Sequence: Synthetic oligonucleotide
ccucuauaagcuucugacu

SEQ ID NO: 2848 - RNA, 19 nt, Artificial Sequence
  Description of Artificial Sequence: Synthetic oligonucleotide
cucuauaagcuucugacua

SEQ ID NO: 2849 - RNA, 19 nt, Artificial Sequence
  Description of Artificial Sequence: Synthetic oligonucleotide
ucuauaagcuucugacuag

SEQ ID NO: 2850 - RNA, 19 nt, Artificial Sequence
  Description of Artificial Sequence: Synthetic oligonucleotide
cuauaagcuucugacuagc

SEQ ID NO: 2851 - RNA, 19 nt, Artificial Sequence
  Description of Artificial Sequence: Synthetic oligonucleotide
uauaagcuucugacuagcc

SEQ ID NO: 2852 - RNA, 19 nt, Artificial Sequence
  Description of Artificial Sequence: Synthetic oligonucleotide
auaagcuucugacuagcca

SEQ ID NO: 2853 - RNA, 19 nt, Artificial Sequence
  Description of Artificial Sequence: Synthetic oligonucleotide
uaagcuucugacuagccaa

SEQ ID NO: 2854 - RNA, 19 nt, Artificial Sequence
  Description of Artificial Sequence: Synthetic oligonucleotide
aagcuucugacuagccaau

SEQ ID NO: 2855 - RNA, 19 nt, Artificial Sequence
  Description of Artificial Sequence: Synthetic oligonucleotide
agcuucugacuagccaaug

SEQ ID NO: 2856 - RNA, 19 nt, Artificial Sequence
  Description of Artificial Sequence: Synthetic oligonucleotide
gcuucugacuagccaaugg

SEQ ID NO: 2857 - RNA, 19 nt, Artificial Sequence
  Description of Artificial Sequence: Synthetic oligonucleotide
cuucugacuagccaauggc

SEQ ID NO: 2858 - RNA, 19 nt, Artificial Sequence
  Description of Artificial Sequence: Synthetic oligonucleotide
uucugacuagccaauggca

SEQ ID NO: 2859 - RNA, 19 nt, Artificial Sequence
  Description of Artificial Sequence: Synthetic oligonucleotide
ucugacuagccaauggcau

SEQ ID NO: 2860 - RNA, 19 nt, Artificial Sequence
  Description of Artificial Sequence: Synthetic oligonucleotide
cugacuagccaauggcauc

SEQ ID NO: 2861 - RNA, 19 nt, Artificial Sequence
  Description of Artificial Sequence: Synthetic oligonucleotide
ugacuagccaauggcauca

SEQ ID NO: 2862 - RNA, 19 nt, Artificial Sequence
  Description of Artificial Sequence: Synthetic oligonucleotide
gacuagccaauggcaucau

SEQ ID NO: 2863 - RNA, 19 nt, Artificial Sequence
  Description of Artificial Sequence: Synthetic oligonucleotide
acuagccaauggcaucauc

SEQ ID NO: 2864 - RNA, 19 nt, Artificial Sequence
  Description of Artificial Sequence: Synthetic oligonucleotide
cuagccaauggcaucaucc

SEQ ID NO: 2865 - RNA, 19 nt, Artificial Sequence
  Description of Artificial Sequence: Synthetic oligonucleotide
uagccaauggcaucaucca

SEQ ID NO: 2866 - RNA, 19 nt, Artificial Sequence
  Description of Artificial Sequence: Synthetic oligonucleotide
agccaauggcaucauccaa

SEQ ID NO: 2867 - RNA, 19 nt, Artificial Sequence
  Description of Artificial Sequence: Synthetic oligonucleotide
gccaauggcaucauccaau

SEQ ID NO: 2868 - RNA, 19 nt, Artificial Sequence
  Description of Artificial Sequence: Synthetic oligonucleotide
ccaauggcaucauccaauu

SEQ ID NO: 2869 - RNA, 19 nt, Artificial Sequence
  Description of Artificial Sequence: Synthetic oligonucleotide
caauggcaucauccaauuu

SEQ ID NO: 2870 - RNA, 19 nt, Artificial Sequence
  Description of Artificial Sequence: Synthetic oligonucleotide
aauggcaucauccaauuuu

SEQ ID NO: 2871 - RNA, 19 nt, Artificial Sequence
  Description of Artificial Sequence: Synthetic oligonucleotide
auggcaucauccaauuuuc

SEQ ID NO: 2872 - RNA, 19 nt, Artificial Sequence
  Description of Artificial Sequence: Synthetic oligonucleotide
uggcaucauccaauuuucu

SEQ ID NO: 2873 - RNA, 19 nt, Artificial Sequence
  Description of Artificial Sequence: Synthetic oligonucleotide
ggcaucauccaauuuucuu

SEQ ID NO: 2874 - RNA, 19 nt, Artificial Sequence
  Description of Artificial Sequence: Synthetic oligonucleotide
gcaucauccaauuuucuuc

SEQ ID NO: 2875 - RNA, 19 nt, Artificial Sequence
  Description of Artificial Sequence: Synthetic oligonucleotide
caucauccaauuuucuucc

SEQ ID NO: 2876 - RNA, 19 nt, Artificial Sequence
  Description of Artificial Sequence: Synthetic oligonucleotide
aucauccaauuuucuuccc

SEQ ID NO: 2877 - RNA, 19 nt, Artificial Sequence
  Description of Artificial Sequence: Synthetic oligonucleotide
ucauccaauuuucuuccca

SEQ ID NO: 2878 - RNA, 19 nt, Artificial Sequence
  Description of Artificial Sequence: Synthetic oligonucleotide
cauccaauuuucuucccaa

SEQ ID NO: 2879 - RNA, 19 nt, Artificial Sequence
  Description of Artificial Sequence: Synthetic oligonucleotide
auccaauuuucuucccaaa

SEQ ID NO: 2880 - RNA, 19 nt, Artificial Sequence
  Description of Artificial Sequence: Synthetic oligonucleotide
uccaauuuucuucccaaac

SEQ ID NO: 2881 - RNA, 19 nt, Artificial Sequence
  Description of Artificial Sequence: Synthetic oligonucleotide
ccaauuuucuucccaaacc

SEQ ID NO: 2882 - RNA, 19 nt, Artificial Sequence
  Description of Artificial Sequence: Synthetic oligonucleotide
caauuuucuucccaaaccu

SEQ ID NO: 2883 - RNA, 19 nt, Artificial Sequence
  Description of Artificial Sequence: Synthetic oligonucleotide
aauuuucuucccaaaccuc

SEQ ID NO: 2884 - RNA, 19 nt, Artificial Sequence
  Description of Artificial Sequence: Synthetic oligonucleotide
auuuucuucccaaaccucu

SEQ ID NO: 2885 - RNA, 19 nt, Artificial Sequence
  Description of Artificial Sequence: Synthetic oligonucleotide
uuuucuucccaaaccucug

SEQ ID NO: 2886 - RNA, 19 nt, Artificial Sequence
  Description of Artificial Sequence: Synthetic oligonucleotide
uuucuucccaaaccucugc

SEQ ID NO: 2887 - RNA, 19 nt, Artificial Sequence
  Description of Artificial Sequence: Synthetic oligonucleotide
uucuucccaaaccucugca

SEQ ID NO: 2888 - RNA, 19 nt, Artificial Sequence
  Description of Artificial Sequence: Synthetic oligonucleotide
ucuucccaaaccucugcag

SEQ ID NO: 2889 - RNA, 19 nt, Artificial Sequence
  Description of Artificial Sequence: Synthetic oligonucleotide
cuucccaaaccucugcagc

SEQ ID NO: 2890 - RNA, 19 nt, Artificial Sequence
  Description of Artificial Sequence: Synthetic oligonucleotide
uucccaaaccucugcagca

SEQ ID NO: 2891 - RNA, 19 nt, Artificial Sequence
  Description of Artificial Sequence: Synthetic oligonucleotide
ucccaaaccucugcagcau

SEQ ID NO: 2892 - RNA, 19 nt, Artificial Sequence
  Description of Artificial Sequence: Synthetic oligonucleotide
cccaaaccucugcagcauc

SEQ ID NO: 2893 - RNA, 19 nt, Artificial Sequence
  Description of Artificial Sequence: Synthetic oligonucleotide
ccaaaccucugcagcaucu

SEQ ID NO: 2894 - RNA, 19 nt, Artificial Sequence
  Description of Artificial Sequence: Synthetic oligonucleotide
caaaccucugcagcaucug

SEQ ID NO: 2895 - RNA, 19 nt, Artificial Sequence
  Description of Artificial Sequence: Synthetic oligonucleotide
aaaccucugcagcaucugc

SEQ ID NO: 2896 - RNA, 19 nt, Artificial Sequence
  Description of Artificial Sequence: Synthetic oligonucleotide
aaccucugcagcaucugcu

SEQ ID NO: 2897 - RNA, 19 nt, Artificial Sequence
  Description of Artificial Sequence: Synthetic oligonucleotide
accucugcagcaucugcuu

SEQ ID NO: 2898 - RNA, 19 nt, Artificial Sequence
  Description of Artificial Sequence: Synthetic oligonucleotide
ccucugcagcaucugcuuu

SEQ ID NO: 2899 - RNA, 19 nt, Artificial Sequence
  Description of Artificial Sequence: Synthetic oligonucleotide
cucugcagcaucugcuuua

SEQ ID NO: 2900 - RNA, 19 nt, Artificial Sequence
  Description of Artificial Sequence: Synthetic oligonucleotide
ucugcagcaucugcuuuau

SEQ ID NO: 2901 - RNA, 19 nt, Artificial Sequence
  Description of Artificial Sequence: Synthetic oligonucleotide
cugcagcaucugcuuuauu

SEQ ID NO: 2902 - RNA, 19 nt, Artificial Sequence
  Description of Artificial Sequence: Synthetic oligonucleotide
ugcagcaucugcuuuauug

SEQ ID NO: 2903 - RNA, 19 nt, Artificial Sequence
  Description of Artificial Sequence: Synthetic oligonucleotide
gcagcaucugcuuuauugc

SEQ ID NO: 2904 - RNA, 19 nt, Artificial Sequence
  Description of Artificial Sequence: Synthetic oligonucleotide
cagcaucugcuuuauugcc

SEQ ID NO: 2905 - RNA, 19 nt, Artificial Sequence
  Description of Artificial Sequence: Synthetic oligonucleotide
agcaucugcuuuauugcca

SEQ ID NO: 2906 - RNA, 19 nt, Artificial Sequence
  Description of Artificial Sequence: Synthetic oligonucleotide
gcaucugcuuuauugccaa

SEQ ID NO: 2907 - RNA, 19 nt, Artificial Sequence
  Description of Artificial Sequence: Synthetic oligonucleotide
caucugcuuuauugccaaa

SEQ ID NO: 2908 - RNA, 19 nt, Artificial Sequence
  Description of Artificial Sequence: Synthetic oligonucleotide
aucugcuuuauugccaaag

SEQ ID NO: 2909 - RNA, 19 nt, Artificial Sequence
  Description of Artificial Sequence: Synthetic oligonucleotide
ucugcuuuauugccaaagg

SEQ ID NO: 2910 - RNA, 19 nt, Artificial Sequence
  Description of Artificial Sequence: Synthetic oligonucleotide
cugcuuuauugccaaaggg

SEQ ID NO: 2911 - RNA, 19 nt, Artificial Sequence
  Description of Artificial Sequence: Synthetic oligonucleotide
ugcuuuauugccaaagggc

SEQ ID NO: 2912 - RNA, 19 nt, Artificial Sequence
  Description of Artificial Sequence: Synthetic oligonucleotide
gcuuuauugccaaagggcu

SEQ ID NO: 2913 - RNA, 19 nt, Artificial Sequence
  Description of Artificial Sequence: Synthetic oligonucleotide
cuuuauugccaaagggcua

SEQ ID NO: 2914 - RNA, 19 nt, Artificial Sequence
  Description of Artificial Sequence: Synthetic oligonucleotide
uuuauugccaaagggcuag

SEQ ID NO: 2915 - RNA, 19 nt, Artificial Sequence
  Description of Artificial Sequence: Synthetic oligonucleotide
uuauugccaaagggcuagu

SEQ ID NO: 2916 - RNA, 19 nt, Artificial Sequence
  Description of Artificial Sequence: Synthetic oligonucleotide
uauugccaaagggcuaguu

SEQ ID NO: 2917 - RNA, 19 nt, Artificial Sequence
  Description of Artificial Sequence: Synthetic oligonucleotide
auugccaaagggcuaguuu

SEQ ID NO: 2918 - RNA, 19 nt, Artificial Sequence
  Description of Artificial Sequence: Synthetic oligonucleotide
uugccaaagggcuaguuuc

SEQ ID NO: 2919 - RNA, 19 nt, Artificial Sequence
  Description of Artificial Sequence: Synthetic oligonucleotide
ugccaaagggcuaguuucg

SEQ ID NO: 2920 - RNA, 19 nt, Artificial Sequence
  Description of Artificial Sequence: Synthetic oligonucleotide
gccaaagggcuaguuucgg

SEQ ID NO: 2921 - RNA, 19 nt, Artificial Sequence
  Description of Artificial Sequence: Synthetic oligonucleotide
ccaaagggcuaguuucggu

SEQ ID NO: 2922 - RNA, 19 nt, Artificial Sequence
  Description of Artificial Sequence: Synthetic oligonucleotide
caaagggcuaguuucgguu

SEQ ID NO: 2923 - RNA, 19 nt, Artificial Sequence
  Description of Artificial Sequence: Synthetic oligonucleotide
aaagggcuaguuucgguuu

SEQ ID NO: 2924 - RNA, 19 nt, Artificial Sequence
  Description of Artificial Sequence: Synthetic oligonucleotide
aagggcuaguuucgguuuu

SEQ ID NO: 2925 - RNA, 19 nt, Artificial Sequence
  Description of Artificial Sequence: Synthetic oligonucleotide
agggcuaguuucgguuuuc

SEQ ID NO: 2926 - RNA, 19 nt, Artificial Sequence
  Description of Artificial Sequence: Synthetic oligonucleotide
gggcuaguuucgguuuucu

SEQ ID NO: 2927 - RNA, 19 nt, Artificial Sequence
  Description of Artificial Sequence: Synthetic oligonucleotide
ggcuaguuucgguuuucug

SEQ ID NO: 2928 - RNA, 19 nt, Artificial Sequence
  Description of Artificial Sequence: Synthetic oligonucleotide
gcuaguuucgguuuucugc

SEQ ID NO: 2929 - RNA, 19 nt, Artificial Sequence
  Description of Artificial Sequence: Synthetic oligonucleotide
cuaguuucgguuuucugca

SEQ ID NO: 2930 - RNA, 19 nt, Artificial Sequence
  Description of Artificial Sequence: Synthetic oligonucleotide
uaguuucgguuuucugcag

SEQ ID NO: 2931 - RNA, 19 nt, Artificial Sequence
  Description of Artificial Sequence: Synthetic oligonucleotide
aguuucgguuuucugcagc

SEQ ID NO: 2932 - RNA, 19 nt, Artificial Sequence
  Description of Artificial Sequence: Synthetic oligonucleotide
guuucgguuuucugcagcc

SEQ ID NO: 2933 - RNA, 19 nt, Artificial Sequence
  Description of Artificial Sequence: Synthetic oligonucleotide
uuucgguuuucugcagcca

SEQ ID NO: 2934 - RNA, 19 nt, Artificial Sequence
  Description of Artificial Sequence: Synthetic oligonucleotide
uucgguuuucugcagccau

SEQ ID NO: 2935 - RNA, 19 nt, Artificial Sequence
  Description of Artificial Sequence: Synthetic oligonucleotide
ucgguuuucugcagccauu

SEQ ID NO: 2936 - RNA, 19 nt, Artificial Sequence
  Description of Artificial Sequence: Synthetic oligonucleotide
cgguuuucugcagccauug

SEQ ID NO: 2937 - RNA, 19 nt, Artificial Sequence
  Description of Artificial Sequence: Synthetic oligonucleotide
gguuuucugcagccauugc

SEQ ID NO: 2938 - RNA, 19 nt, Artificial Sequence
  Description of Artificial Sequence: Synthetic oligonucleotide
guuuucugcagccauugcg

SEQ ID NO: 2939 - RNA, 19 nt, Artificial Sequence
  Description of Artificial Sequence: Synthetic oligonucleotide
uuuucugcagccauugcgg

SEQ ID NO: 2940 - RNA, 19 nt, Artificial Sequence
  Description of Artificial Sequence: Synthetic oligonucleotide
uuucugcagccauugcggu

SEQ ID NO: 2941 - RNA, 19 nt, Artificial Sequence
  Description of Artificial Sequence: Synthetic oligonucleotide
uucugcagccauugcgguu

SEQ ID NO: 2942 - RNA, 19 nt, Artificial Sequence
  Description of Artificial Sequence: Synthetic oligonucleotide
ucugcagccauugcgguua

SEQ ID NO: 2943 - RNA, 19 nt, Artificial Sequence
  Description of Artificial Sequence: Synthetic oligonucleotide
cugcagccauugcgguuaa

SEQ ID NO: 2944 - RNA, 19 nt, Artificial Sequence
  Description of Artificial Sequence: Synthetic oligonucleotide
ugcagccauugcgguuaaa

SEQ ID NO: 2945 - RNA, 19 nt, Artificial Sequence
  Description of Artificial Sequence: Synthetic oligonucleotide
gcagccauugcgguuaaaa

SEQ ID NO: 2946 - RNA, 19 nt, Artificial Sequence
  Description of Artificial Sequence: Synthetic oligonucleotide
cagccauugcgguuaaaaa

SEQ ID NO: 2947 - RNA, 19 nt, Artificial Sequence
  Description of Artificial Sequence: Synthetic oligonucleotide
agccauugcgguuaaaaaa

SEQ ID NO: 2948 - RNA, 19 nt, Artificial Sequence
  Description of Artificial Sequence: Synthetic oligonucleotide
gccauugcgguuaaaaaau

SEQ ID NO: 2949 - RNA, 19 nt, Artificial Sequence
  Description of Artificial Sequence: Synthetic oligonucleotide
ccauugcgguuaaaaaaua

SEQ ID NO: 2950 - RNA, 19 nt, Artificial Sequence
  Description of Artificial Sequence: Synthetic oligonucleotide
cauugcgguuaaaaaauau

SEQ ID NO: 2951 - RNA, 19 nt, Artificial Sequence
  Description of Artificial Sequence: Synthetic oligonucleotide
auugcgguuaaaaaauaua

SEQ ID NO: 2952 - RNA, 19 nt, Artificial Sequence
  Description of Artificial Sequence: Synthetic oligonucleotide
uugcgguuaaaaaauauaa

SEQ ID NO: 2953 - RNA, 19 nt, Artificial Sequence
  Description of Artificial Sequence: Synthetic oligonucleotide
ugcgguuaaaaaauauaag

SEQ ID NO: 2954 - RNA, 19 nt, Artificial Sequence
  Description of Artificial Sequence: Synthetic oligonucleotide
gcgguuaaaaaauauaagu

SEQ ID NO: 2955 - RNA, 19 nt, Artificial Sequence
  Description of Artificial Sequence: Synthetic oligonucleotide
cgguuaaaaaauauaagua

SEQ ID NO: 2956 - RNA, 19 nt, Artificial Sequence
  Description of Artificial Sequence: Synthetic oligonucleotide
gguuaaaaaauauaaguag

SEQ ID NO: 2957 - RNA, 19 nt, Artificial Sequence
  Description of Artificial Sequence: Synthetic oligonucleotide
guuaaaaaauauaaguagg

SEQ ID NO: 2958 - RNA, 19 nt, Artificial Sequence
  Description of Artificial Sequence: Synthetic oligonucleotide
uuaaaaaauauaaguagga

SEQ ID NO: 2959 - RNA, 19 nt, Artificial Sequence
  Description of Artificial Sequence: Synthetic oligonucleotide
uaaaaaauauaaguaggau

SEQ ID NO: 2960 - RNA, 19 nt, Artificial Sequence
  Description of Artificial Sequence: Synthetic oligonucleotide
aaaaaauauaaguaggaua

SEQ ID NO: 2961 - RNA, 19 nt, Artificial Sequence
  Description of Artificial Sequence: Synthetic oligonucleotide
aaaaauauaaguaggauaa

SEQ ID NO: 2962 - RNA, 19 nt, Artificial Sequence
  Description of Artificial Sequence: Synthetic oligonucleotide
aaaauauaaguaggauaac

SEQ ID NO: 2963 - RNA, 19 nt, Artificial Sequence
  Description of Artificial Sequence: Synthetic oligonucleotide
aaauauaaguaggauaacu

SEQ ID NO: 2964 - RNA, 19 nt, Artificial Sequence
  Description of Artificial Sequence: Synthetic oligonucleotide
aauauaaguaggauaacuu

SEQ ID NO: 2965 - RNA, 19 nt, Artificial Sequence
  Description of Artificial Sequence: Synthetic oligonucleotide
auauaaguaggauaacuug

SEQ ID NO: 2966 - RNA, 19 nt, Artificial Sequence
  Description of Artificial Sequence: Synthetic oligonucleotide
uauaaguaggauaacuugu

SEQ ID NO: 2967 - RNA, 19 nt, Artificial Sequence
  Description of Artificial Sequence: Synthetic oligonucleotide
auaaguaggauaacuugua

SEQ ID NO: 2968 - RNA, 19 nt, Artificial Sequence
  Description of Artificial Sequence: Synthetic oligonucleotide
uaaguaggauaacuuguaa

SEQ ID NO: 2969 - RNA, 19 nt, Artificial Sequence
  Description of Artificial Sequence: Synthetic oligonucleotide
aaguaggauaacuuguaaa

SEQ ID NO: 2970 - RNA, 19 nt, Artificial Sequence
  Description of Artificial Sequence: Synthetic oligonucleotide
aguaggauaacuuguaaaa

SEQ ID NO: 2971 - RNA, 19 nt, Artificial Sequence
  Description of Artificial Sequence: Synthetic oligonucleotide
guaggauaacuuguaaaac

SEQ ID NO: 2972 - RNA, 19 nt, Artificial Sequence
  Description of Artificial Sequence: Synthetic oligonucleotide
uaggauaacuuguaaaacc

SEQ ID NO: 2973 - RNA, 19 nt, Artificial Sequence
  Description of Artificial Sequence: Synthetic oligonucleotide
aggauaacuuguaaaaccu

SEQ ID NO: 2974 - RNA, 19 nt, Artificial Sequence
  Description of Artificial Sequence: Synthetic oligonucleotide
ggauaacuuguaaaaccug

SEQ ID NO: 2975 - RNA, 19 nt, Artificial Sequence
  Description of Artificial Sequence: Synthetic oligonucleotide
gauaacuuguaaaaccugc

SEQ ID NO: 2976 - RNA, 19 nt, Artificial Sequence
  Description of Artificial Sequence: Synthetic oligonucleotide
auaacuuguaaaaccugca

SEQ ID NO: 2977 - RNA, 19 nt, Artificial Sequence
  Description of Artificial Sequence: Synthetic oligonucleotide
uaacuuguaaaaccugcau

SEQ ID NO: 2978 - RNA, 19 nt, Artificial Sequence
  Description of Artificial Sequence: Synthetic oligonucleotide
aacuuguaaaaccugcaua

SEQ ID NO: 2979 - RNA, 19 nt, Artificial Sequence
  Description of Artificial Sequence: Synthetic oligonucleotide
acuuguaaaaccugcauau

SEQ ID NO: 2980 - RNA, 19 nt, Artificial Sequence
  Description of Artificial Sequence: Synthetic oligonucleotide
cuuguaaaaccugcauauu

SEQ ID NO: 2981 - RNA, 19 nt, Artificial Sequence
  Description of Artificial Sequence: Synthetic oligonucleotide
uuguaaaaccugcauauug

SEQ ID NO: 2982 - RNA, 19 nt, Artificial Sequence
  Description of Artificial Sequence: Synthetic oligonucleotide
uguaaaaccugcauauugc

SEQ ID NO: 2983 - RNA, 19 nt, Artificial Sequence
  Description of Artificial Sequence: Synthetic oligonucleotide
guaaaaccugcauauugcu

SEQ ID NO: 2984 - RNA, 19 nt, Artificial Sequence
  Description of Artificial Sequence: Synthetic oligonucleotide
uaaaaccugcauauugcua

SEQ ID NO: 2985 - RNA, 19 nt, Artificial Sequence
  Description of Artificial Sequence: Synthetic oligonucleotide
aaaaccugcauauugcuaa

SEQ ID NO: 2986 - RNA, 19 nt, Artificial Sequence
  Description of Artificial Sequence: Synthetic oligonucleotide
aaaccugcauauugcuaau

SEQ ID NO: 2987 - RNA, 19 nt, Artificial Sequence
  Description of Artificial Sequence: Synthetic oligonucleotide
aaccugcauauugcuaauc

SEQ ID NO: 2988 - RNA, 19 nt, Artificial Sequence
  Description of Artificial Sequence: Synthetic oligonucleotide
accugcauauugcuaaucu

SEQ ID NO: 2989 - RNA, 19 nt, Artificial Sequence
  Description of Artificial Sequence: Synthetic oligonucleotide
ccugcauauugcuaaucua

SEQ ID NO: 2990 - RNA, 19 nt, Artificial Sequence
  Description of Artificial Sequence: Synthetic oligonucleotide
cugcauauugcuaaucuau

SEQ ID NO: 2991 - RNA, 19 nt, Artificial Sequence
  Description of Artificial Sequence: Synthetic oligonucleotide
ugcauauugcuaaucuaua

SEQ ID NO: 2992 - RNA, 19 nt, Artificial Sequence
  Description of Artificial Sequence: Synthetic oligonucleotide
gcauauugcuaaucuauag

SEQ ID NO: 2993 - RNA, 19 nt, Artificial Sequence
  Description of Artificial Sequence: Synthetic oligonucleotide
cauauugcuaaucuauaga

SEQ ID NO: 2994 - RNA, 19 nt, Artificial Sequence
  Description of Artificial Sequence: Synthetic oligonucleotide
auauugcuaaucuauagac

SEQ ID NO: 2995 - RNA, 19 nt, Artificial Sequence
  Description of Artificial Sequence: Synthetic oligonucleotide
uauugcuaaucuauagaca

SEQ ID NO: 2996 - RNA, 19 nt, Artificial Sequence
  Description of Artificial Sequence: Synthetic oligonucleotide
auugcuaaucuauagacac

SEQ ID NO: 2997 - RNA, 19 nt, Artificial Sequence
  Description of Artificial Sequence: Synthetic oligonucleotide
uugcuaaucuauagacacc

SEQ ID NO: 2998 - RNA, 19 nt, Artificial Sequence
  Description of Artificial Sequence: Synthetic oligonucleotide
ugcuaaucuauagacacca

SEQ ID NO: 2999 - RNA, 19 nt, Artificial Sequence
  Description of Artificial Sequence: Synthetic oligonucleotide
gcuaaucuauagacaccac

SEQ ID NO: 3000 - RNA, 19 nt, Artificial Sequence
  Description of Artificial Sequence: Synthetic oligonucleotide
cuaaucuauagacaccaca

SEQ ID NO: 3001 - RNA, 19 nt, Artificial Sequence
  Description of Artificial Sequence: Synthetic oligonucleotide
uaaucuauagacaccacag

SEQ ID NO: 3002 - RNA, 19 nt, Artificial Sequence
  Description of Artificial Sequence: Synthetic oligonucleotide
aaucuauagacaccacagu

SEQ ID NO: 3003 - RNA, 19 nt, Artificial Sequence
  Description of Artificial Sequence: Synthetic oligonucleotide
aucuauagacaccacaguu

SEQ ID NO: 3004 - RNA, 19 nt, Artificial Sequence
  Description of Artificial Sequence: Synthetic oligonucleotide
ucuauagacaccacaguuu

SEQ ID NO: 3005 - RNA, 19 nt, Artificial Sequence
  Description of Artificial Sequence: Synthetic oligonucleotide
cuauagacaccacaguuuc

SEQ ID NO: 3006 - RNA, 19 nt, Artificial Sequence
  Description of Artificial Sequence: Synthetic oligonucleotide
uauagacaccacaguuucu

SEQ ID NO: 3007 - RNA, 19 nt, Artificial Sequence
  Description of Artificial Sequence: Synthetic oligonucleotide
auagacaccacaguuucua

SEQ ID NO: 3008 - RNA, 19 nt, Artificial Sequence
  Description of Artificial Sequence: Synthetic oligonucleotide
uagacaccacaguuucuaa

SEQ ID NO: 3009 - RNA, 19 nt, Artificial Sequence
  Description of Artificial Sequence: Synthetic oligonucleotide
agacaccacaguuucuaaa

SEQ ID NO: 3010 - RNA, 19 nt, Artificial Sequence
  Description of Artificial Sequence: Synthetic oligonucleotide
gacaccacaguuucuaaau

SEQ ID NO: 3011 - RNA, 19 nt, Artificial Sequence
  Description of Artificial Sequence: Synthetic oligonucleotide
acaccacaguuucuaaauu

SEQ ID NO: 3012 - RNA, 19 nt, Artificial Sequence
  Description of Artificial Sequence: Synthetic oligonucleotide
caccacaguuucuaaauuc

SEQ ID NO: 3013 - RNA, 19 nt, Artificial Sequence
  Description of Artificial Sequence: Synthetic oligonucleotide
accacaguuucuaaauucu

SEQ ID NO: 3014 - RNA, 19 nt, Artificial Sequence
  Description of Artificial Sequence: Synthetic oligonucleotide
ccacaguuucuaaauucuu

SEQ ID NO: 3015 - RNA, 19 nt, Artificial Sequence
  Description of Artificial Sequence: Synthetic oligonucleotide
cacaguuucuaaauucuuu

SEQ ID NO: 3016 - RNA, 19 nt, Artificial Sequence
  Description of Artificial Sequence: Synthetic oligonucleotide
acaguuucuaaauucuuug

SEQ ID NO: 3017 - RNA, 19 nt, Artificial Sequence
  Description of Artificial Sequence: Synthetic oligonucleotide
caguuucuaaauucuuuga

SEQ ID NO: 3018 - RNA, 19 nt, Artificial Sequence
  Description of Artificial Sequence: Synthetic oligonucleotide
aguuucuaaauucuuugaa

SEQ ID NO: 3019 - RNA, 19 nt, Artificial Sequence
  Description of Artificial Sequence: Synthetic oligonucleotide
guuucuaaauucuuugaaa

SEQ ID NO: 3020 - RNA, 19 nt, Artificial Sequence
  Description of Artificial Sequence: Synthetic oligonucleotide
uuucuaaauucuuugaaac

SEQ ID NO: 3021 - RNA, 19 nt, Artificial Sequence
  Description of Artificial Sequence: Synthetic oligonucleotide
uucuaaauucuuugaaacc

SEQ ID NO: 3022 - RNA, 19 nt, Artificial Sequence
  Description of Artificial Sequence: Synthetic oligonucleotide
ucuaaauucuuugaaacca

SEQ ID NO: 3023 - RNA, 19 nt, Artificial Sequence
  Description of Artificial Sequence: Synthetic oligonucleotide
cuaaauucuuugaaaccac

SEQ ID NO: 3024 - RNA, 19 nt, Artificial Sequence
  Description of Artificial Sequence: Synthetic oligonucleotide
uaaauucuuugaaaccacu

SEQ ID NO: 3025 - RNA, 19 nt, Artificial Sequence
  Description of Artificial Sequence: Synthetic oligonucleotide
aaauucuuugaaaccacuu

SEQ ID NO: 3026 - RNA, 19 nt, Artificial Sequence
  Description of Artificial Sequence: Synthetic oligonucleotide
aauucuuugaaaccacuuu

SEQ ID NO: 3027 - RNA, 19 nt, Artificial Sequence
  Description of Artificial Sequence: Synthetic oligonucleotide
auucuuugaaaccacuuua

SEQ ID NO: 3028 - RNA, 19 nt, Artificial Sequence
  Description of Artificial Sequence: Synthetic oligonucleotide
uucuuugaaaccacuuuac

SEQ ID NO: 3029 - RNA, 19 nt, Artificial Sequence
  Description of Artificial Sequence: Synthetic oligonucleotide
ucuuugaaaccacuuuacu

SEQ ID NO: 3030 - RNA, 19 nt, Artificial Sequence
  Description of Artificial Sequence: Synthetic oligonucleotide
cuuugaaaccacuuuacua

SEQ ID NO: 3031 - RNA, 19 nt, Artificial Sequence
  Description of Artificial Sequence: Synthetic oligonucleotide
uuugaaaccacuuuacuac

SEQ ID NO: 3032 - RNA, 19 nt, Artificial Sequence
  Description of Artificial Sequence: Synthetic oligonucleotide
uugaaaccacuuuacuacu

SEQ ID NO: 3033 - RNA, 19 nt, Artificial Sequence
  Description of Artificial Sequence: Synthetic oligonucleotide
ugaaaccacuuuacuacuu

SEQ ID NO: 3034 - RNA, 19 nt, Artificial Sequence
  Description of Artificial Sequence: Synthetic oligonucleotide
gaaaccacuuuacuacuuu

SEQ ID NO: 3035 - RNA, 19 nt, Artificial Sequence
  Description of Artificial Sequence: Synthetic oligonucleotide
aaaccacuuuacuacuuuu

SEQ ID NO: 3036 - RNA, 19 nt, Artificial Sequence
  Description of Artificial Sequence: Synthetic oligonucleotide
aaccacuuuacuacuuuuu

SEQ ID NO: 3037 - RNA, 19 nt, Artificial Sequence
  Description of Artificial Sequence: Synthetic oligonucleotide
accacuuuacuacuuuuuu

SEQ ID NO: 3038 - RNA, 19 nt, Artificial Sequence
  Description of Artificial Sequence: Synthetic oligonucleotide
ccacuuuacuacuuuuuuu

SEQ ID NO: 3039 - RNA, 19 nt, Artificial Sequence
  Description of Artificial Sequence: Synthetic oligonucleotide
cacuuuacuacuuuuuuua

SEQ ID NO: 3040 - RNA, 19 nt, Artificial Sequence
  Description of Artificial Sequence: Synthetic oligonucleotide
acuuuacuacuuuuuuuaa

SEQ ID NO: 3041 - RNA, 19 nt, Artificial Sequence
  Description of Artificial Sequence: Synthetic oligonucleotide
cuuuacuacuuuuuuuaaa

SEQ ID NO: 3042 - RNA, 19 nt, Artificial Sequence
  Description of Artificial Sequence: Synthetic oligonucleotide
uuuacuacuuuuuuuaaac

SEQ ID NO: 3043 - RNA, 19 nt, Artificial Sequence
  Description of Artificial Sequence: Synthetic oligonucleotide
uuacuacuuuuuuuaaacu

SEQ ID NO: 3044 - RNA, 19 nt, Artificial Sequence
  Description of Artificial Sequence: Synthetic oligonucleotide
uacuacuuuuuuuaaacuu

SEQ ID NO: 3045 - RNA, 19 nt, Artificial Sequence
  Description of Artificial Sequence: Synthetic oligonucleotide
acuacuuuuuuuaaacuua

SEQ ID NO: 3046 - RNA, 19 nt, Artificial Sequence
  Description of Artificial Sequence: Synthetic oligonucleotide
cuacuuuuuuuaaacuuaa

SEQ ID NO: 3047 - RNA, 19 nt, Artificial Sequence
  Description of Artificial Sequence: Synthetic oligonucleotide
uacuuuuuuuaaacuuaac

SEQ ID NO: 3048 - RNA, 19 nt, Artificial Sequence
  Description of Artificial Sequence: Synthetic oligonucleotide
acuuuuuuuaaacuuaacu

SEQ ID NO: 3049 - RNA, 19 nt, Artificial Sequence
  Description of Artificial Sequence: Synthetic oligonucleotide
cuuuuuuuaaacuuaacuc

SEQ ID NO: 3050 - RNA, 19 nt, Artificial Sequence
  Description of Artificial Sequence: Synthetic oligonucleotide
uuuuuuuaaacuuaacuca

SEQ ID NO: 3051 - RNA, 19 nt, Artificial Sequence
  Description of Artificial Sequence: Synthetic oligonucleotide
uuuuuuaaacuuaacucag

SEQ ID NO: 3052 - RNA, 19 nt, Artificial Sequence
  Description of Artificial Sequence: Synthetic oligonucleotide
uuuuuaaacuuaacucagu

SEQ ID NO: 3053 - RNA, 19 nt, Artificial Sequence
  Description of Artificial Sequence: Synthetic oligonucleotide
uuuuaaacuuaacucaguu

SEQ ID NO: 3054 - RNA, 19 nt, Artificial Sequence
  Description of Artificial Sequence: Synthetic oligonucleotide
uuuaaacuuaacucaguuc

SEQ ID NO: 3055 - RNA, 19 nt, Artificial Sequence
  Description of Artificial Sequence: Synthetic oligonucleotide
uuaaacuuaacucaguucu

SEQ ID NO: 3056 - RNA, 19 nt, Artificial Sequence
  Description of Artificial Sequence: Synthetic oligonucleotide
uaaacuuaacucaguucua

SEQ ID NO: 3057 - RNA, 19 nt, Artificial Sequence
  Description of Artificial Sequence: Synthetic oligonucleotide
aaacuuaacucaguucuaa

SEQ ID NO: 3058 - RNA, 19 nt, Artificial Sequence
  Description of Artificial Sequence: Synthetic oligonucleotide
aacuuaacucaguucuaaa

SEQ ID NO: 3059 - RNA, 19 nt, Artificial Sequence
  Description of Artificial Sequence: Synthetic oligonucleotide
acuuaacucaguucuaaau

SEQ ID NO: 3060 - RNA, 19 nt, Artificial Sequence
  Description of Artificial Sequence: Synthetic oligonucleotide
cuuaacucaguucuaaaua

SEQ ID NO: 3061 - RNA, 19 nt, Artificial Sequence
  Description of Artificial Sequence: Synthetic oligonucleotide
uuaacucaguucuaaauac

SEQ ID NO: 3062 - RNA, 19 nt, Artificial Sequence
  Description of Artificial Sequence: Synthetic oligonucleotide
uaacucaguucuaaauacu

SEQ ID NO: 3063 - RNA, 19 nt, Artificial Sequence
  Description of Artificial Sequence: Synthetic oligonucleotide
aacucaguucuaaauacuu

SEQ ID NO: 3064 - RNA, 19 nt, Artificial Sequence
  Description of Artificial Sequence: Synthetic oligonucleotide
acucaguucuaaauacuuu

SEQ ID NO: 3065 - RNA, 19 nt, Artificial Sequence
  Description of Artificial Sequence: Synthetic oligonucleotide
cucaguucuaaauacuuug

SEQ ID NO: 3066 - RNA, 19 nt, Artificial Sequence
  Description of Artificial Sequence: Synthetic oligonucleotide
ucaguucuaaauacuuugu

SEQ ID NO: 3067 - RNA, 19 nt, Artificial Sequence
  Description of Artificial Sequence: Synthetic oligonucleotide
caguucuaaauacuuuguc

SEQ ID NO: 3068 - RNA, 19 nt, Artificial Sequence
  Description of Artificial Sequence: Synthetic oligonucleotide
aguucuaaauacuuugucu

SEQ ID NO: 3069 - RNA, 19 nt, Artificial Sequence
  Description of Artificial Sequence: Synthetic oligonucleotide
guucuaaauacuuugucug

SEQ ID NO: 3070 - RNA, 19 nt, Artificial Sequence
  Description of Artificial Sequence: Synthetic oligonucleotide
uucuaaauacuuugucugg

SEQ ID NO: 3071 - RNA, 19 nt, Artificial Sequence
  Description of Artificial Sequence: Synthetic oligonucleotide
ucuaaauacuuugucugga

SEQ ID NO: 3072 - RNA, 19 nt, Artificial Sequence
  Description of Artificial Sequence: Synthetic oligonucleotide
cuaaauacuuugucuggag

SEQ ID NO: 3073 - RNA, 19 nt, Artificial Sequence
  Description of Artificial Sequence: Synthetic oligonucleotide
uaaauacuuugucuggagc

SEQ ID NO: 3074 - RNA, 19 nt, Artificial Sequence
  Description of Artificial Sequence: Synthetic oligonucleotide
aaauacuuugucuggagca

SEQ ID NO: 3075 - RNA, 19 nt, Artificial Sequence
  Description of Artificial Sequence: Synthetic oligonucleotide
aauacuuugucuggagcac

SEQ ID NO: 3076 - RNA, 19 nt, Artificial Sequence
  Description of Artificial Sequence: Synthetic oligonucleotide
auacuuugucuggagcaca

SEQ ID NO: 3077 - RNA, 19 nt, Artificial Sequence
  Description of Artificial Sequence: Synthetic oligonucleotide
uacuuugucuggagcacaa

SEQ ID NO: 3078 - RNA, 19 nt, Artificial Sequence
  Description of Artificial Sequence: Synthetic oligonucleotide
acuuugucuggagcacaaa

SEQ ID NO: 3079 - RNA, 19 nt, Artificial Sequence
  Description of Artificial Sequence: Synthetic oligonucleotide
cuuugucuggagcacaaaa

SEQ ID NO: 3080 - RNA, 19 nt, Artificial Sequence
  Description of Artificial Sequence: Synthetic oligonucleotide
uuugucuggagcacaaaac

SEQ ID NO: 3081 - RNA, 19 nt, Artificial Sequence
  Description of Artificial Sequence: Synthetic oligonucleotide
uugucuggagcacaaaaca

SEQ ID NO: 3082 - RNA, 19 nt, Artificial Sequence
  Description of Artificial Sequence: Synthetic oligonucleotide
ugucuggagcacaaaacaa

SEQ ID NO: 3083 - RNA, 19 nt, Artificial Sequence
  Description of Artificial Sequence: Synthetic oligonucleotide
gucuggagcacaaaacaau

SEQ ID NO: 3084 - RNA, 19 nt, Artificial Sequence
  Description of Artificial Sequence: Synthetic oligonucleotide
ucuggagcacaaaacaaua

SEQ ID NO: 3085 - RNA, 19 nt, Artificial Sequence
  Description of Artificial Sequence: Synthetic oligonucleotide
cuggagcacaaaacaauaa

SEQ ID NO: 3086 - RNA, 19 nt, Artificial Sequence
  Description of Artificial Sequence: Synthetic oligonucleotide
uggagcacaaaacaauaaa

SEQ ID NO: 3087 - RNA, 19 nt, Artificial Sequence
  Description of Artificial Sequence: Synthetic oligonucleotide
ggagcacaaaacaauaaaa

SEQ ID NO: 3088 - RNA, 19 nt, Artificial Sequence
  Description of Artificial Sequence: Synthetic oligonucleotide
gagcacaaaacaauaaaag

SEQ ID NO: 3089 - RNA, 19 nt, Artificial Sequence
  Description of Artificial Sequence: Synthetic oligonucleotide
agcacaaaacaauaaaagg

SEQ ID NO: 3090 - RNA, 19 nt, Artificial Sequence
  Description of Artificial Sequence: Synthetic oligonucleotide
gcacaaaacaauaaaaggu

SEQ ID NO: 3091 - RNA, 19 nt, Artificial Sequence
  Description of Artificial Sequence: Synthetic oligonucleotide
cacaaaacaauaaaagguu

SEQ ID NO: 3092 - RNA, 19 nt, Artificial Sequence
  Description of Artificial Sequence: Synthetic oligonucleotide
acaaaacaauaaaagguua

SEQ ID NO: 3093 - RNA, 19 nt, Artificial Sequence
  Description of Artificial Sequence: Synthetic oligonucleotide
caaaacaauaaaagguuau

SEQ ID NO: 3094 - RNA, 19 nt, Artificial Sequence
  Description of Artificial Sequence: Synthetic oligonucleotide
aaaacaauaaaagguuauc

SEQ ID NO: 3095 - RNA, 19 nt, Artificial Sequence
  Description of Artificial Sequence: Synthetic oligonucleotide
aaacaauaaaagguuaucu

SEQ ID NO: 3096 - RNA, 19 nt, Artificial Sequence
  Description of Artificial Sequence: Synthetic oligonucleotide
aacaauaaaagguuaucuu

SEQ ID NO: 3097 - RNA, 19 nt, Artificial Sequence
  Description of Artificial Sequence: Synthetic oligonucleotide
acaauaaaagguuaucuua

SEQ ID NO: 3098 - RNA, 19 nt, Artificial Sequence
  Description of Artificial Sequence: Synthetic oligonucleotide
caauaaaagguuaucuuau

SEQ ID NO: 3099 - RNA, 19 nt, Artificial Sequence
  Description of Artificial Sequence: Synthetic oligonucleotide
aauaaaagguuaucuuaua

SEQ ID NO: 3100 - RNA, 19 nt, Artificial Sequence
  Description of Artificial Sequence: Synthetic oligonucleotide
auaaaagguuaucuuauag

SEQ ID NO: 3101 - RNA, 19 nt, Artificial Sequence
  Description of Artificial Sequence: Synthetic oligonucleotide
uaaaagguuaucuuauagu

SEQ ID NO: 3102 - RNA, 19 nt, Artificial Sequence
  Description of Artificial Sequence: Synthetic oligonucleotide
aaaagguuaucuuauaguc

SEQ ID NO: 3103 - RNA, 19 nt, Artificial Sequence
  Description of Artificial Sequence: Synthetic oligonucleotide
aaagguuaucuuauagucg

SEQ ID NO: 3104 - RNA, 19 nt, Artificial Sequence
  Description of Artificial Sequence: Synthetic oligonucleotide
aagguuaucuuauagucgu

SEQ ID NO: 3105 - RNA, 19 nt, Artificial Sequence
  Description of Artificial Sequence: Synthetic oligonucleotide
agguuaucuuauagucgug

SEQ ID NO: 3106 - RNA, 19 nt, Artificial Sequence
  Description of Artificial Sequence: Synthetic oligonucleotide
gguuaucuuauagucguga

SEQ ID NO: 3107 - RNA, 19 nt, Artificial Sequence
  Description of Artificial Sequence: Synthetic oligonucleotide
guuaucuuauagucgugac

SEQ ID NO: 3108 - RNA, 19 nt, Artificial Sequence
  Description of Artificial Sequence: Synthetic oligonucleotide
uuaucuuauagucgugacu

SEQ ID NO: 3109 - RNA, 19 nt, Artificial Sequence
  Description of Artificial Sequence: Synthetic oligonucleotide
uaucuuauagucgugacuu

SEQ ID NO: 3110 - RNA, 19 nt, Artificial Sequence
  Description of Artificial Sequence: Synthetic oligonucleotide
aucuuauagucgugacuuu

SEQ ID NO: 3111 - RNA, 19 nt, Artificial Sequence
  Description of Artificial Sequence: Synthetic oligonucleotide
ucuuauagucgugacuuua

SEQ ID NO: 3112 - RNA, 19 nt, Artificial Sequence
  Description of Artificial Sequence: Synthetic oligonucleotide
cuuauagucgugacuuuaa

SEQ ID NO: 3113 - RNA, 19 nt, Artificial Sequence
  Description of Artificial Sequence: Synthetic oligonucleotide
uuauagucgugacuuuaaa

SEQ ID NO: 3114 - RNA, 19 nt, Artificial Sequence
  Description of Artificial Sequence: Synthetic oligonucleotide
uauagucgugacuuuaaac

SEQ ID NO: 3115 - RNA, 19 nt, Artificial Sequence
  Description of Artificial Sequence: Synthetic oligonucleotide
auagucgugacuuuaaacu

SEQ ID NO: 3116 - RNA, 19 nt, Artificial Sequence
  Description of Artificial Sequence: Synthetic oligonucleotide
uagucgugacuuuaaacuu

SEQ ID NO: 3117 - RNA, 19 nt, Artificial Sequence
  Description of Artificial Sequence: Synthetic oligonucleotide
agucgugacuuuaaacuuu

SEQ ID NO: 3118 - RNA, 19 nt, Artificial Sequence
  Description of Artificial Sequence: Synthetic oligonucleotide
gucgugacuuuaaacuuuu

SEQ ID NO: 3119 - RNA, 19 nt, Artificial Sequence
  Description of Artificial Sequence: Synthetic oligonucleotide
ucgugacuuuaaacuuuug

SEQ ID NO: 3120 - RNA, 19 nt, Artificial Sequence
  Description of Artificial Sequence: Synthetic oligonucleotide
cgugacuuuaaacuuuugu

SEQ ID NO: 3121 - RNA, 19 nt, Artificial Sequence
  Description of Artificial Sequence: Synthetic oligonucleotide
gugacuuuaaacuuuugua

SEQ ID NO: 3122 - RNA, 19 nt, Artificial Sequence
  Description of Artificial Sequence: Synthetic oligonucleotide
ugacuuuaaacuuuuguag

SEQ ID NO: 3123 - RNA, 19 nt, Artificial Sequence
  Description of Artificial Sequence: Synthetic oligonucleotide
gacuuuaaacuuuuguaga

SEQ ID NO: 3124 - RNA, 19 nt, Artificial Sequence
  Description of Artificial Sequence: Synthetic oligonucleotide
acuuuaaacuuuuguagac

SEQ ID NO: 3125 - RNA, 19 nt, Artificial Sequence
  Description of Artificial Sequence: Synthetic oligonucleotide
cuuuaaacuuuuguagacc

SEQ ID NO: 3126 - RNA, 19 nt, Artificial Sequence
  Description of Artificial Sequence: Synthetic oligonucleotide
uuuaaacuuuuguagacca

SEQ ID NO: 3127 - RNA, 19 nt, Artificial Sequence
  Description of Artificial Sequence: Synthetic oligonucleotide
uuaaacuuuuguagaccac

SEQ ID NO: 3128 - RNA, 19 nt, Artificial Sequence
  Description of Artificial Sequence: Synthetic oligonucleotide
uaaacuuuuguagaccaca

SEQ ID NO: 3129 - RNA, 19 nt, Artificial Sequence
  Description of Artificial Sequence: Synthetic oligonucleotide
aaacuuuuguagaccacaa

SEQ ID NO: 3130 - RNA, 19 nt, Artificial Sequence
  Description of Artificial Sequence: Synthetic oligonucleotide
aacuuuuguagaccacaau

SEQ ID NO: 3131 - RNA, 19 nt, Artificial Sequence
  Description of Artificial Sequence: Synthetic oligonucleotide
acuuuuguagaccacaauu

SEQ ID NO: 3132 - RNA, 19 nt, Artificial Sequence
  Description of Artificial Sequence: Synthetic oligonucleotide
cuuuuguagaccacaauuc

SEQ ID NO: 3133 - RNA, 19 nt, Artificial Sequence
  Description of Artificial Sequence: Synthetic oligonucleotide
uuuuguagaccacaauuca

SEQ ID NO: 3134 - RNA, 19 nt, Artificial Sequence
  Description of Artificial Sequence: Synthetic oligonucleotide
uuuguagaccacaauucac

SEQ ID NO: 3135 - RNA, 19 nt, Artificial Sequence
  Description of Artificial Sequence: Synthetic oligonucleotide
uuguagaccacaauucacu

SEQ ID NO: 3136 - RNA, 19 nt, Artificial Sequence
  Description of Artificial Sequence: Synthetic oligonucleotide
uguagaccacaauucacuu

SEQ ID NO: 3137 - RNA, 19 nt, Artificial Sequence
  Description of Artificial Sequence: Synthetic oligonucleotide
guagaccacaauucacuuu

SEQ ID NO: 3138 - RNA, 19 nt, Artificial Sequence
  Description of Artificial Sequence: Synthetic oligonucleotide
uagaccacaauucacuuuu

SEQ ID NO: 3139 - RNA, 19 nt, Artificial Sequence
  Description of Artificial Sequence: Synthetic oligonucleotide
agaccacaauucacuuuuu

SEQ ID NO: 3140 - RNA, 19 nt, Artificial Sequence
  Description of Artificial Sequence: Synthetic oligonucleotide
gaccacaauucacuuuuua

SEQ ID NO: 3141 - RNA, 19 nt, Artificial Sequence
  Description of Artificial Sequence: Synthetic oligonucleotide
accacaauucacuuuuuag

SEQ ID NO: 3142 - RNA, 19 nt, Artificial Sequence
  Description of Artificial Sequence: Synthetic oligonucleotide
ccacaauucacuuuuuagu

SEQ ID NO: 3143 - RNA, 19 nt, Artificial Sequence
  Description of Artificial Sequence: Synthetic oligonucleotide
cacaauucacuuuuuaguu

SEQ ID NO: 3144 - RNA, 19 nt, Artificial Sequence
  Description of Artificial Sequence: Synthetic oligonucleotide
acaauucacuuuuuaguuu

SEQ ID NO: 3145 - RNA, 19 nt, Artificial Sequence
  Description of Artificial Sequence: Synthetic oligonucleotide
caauucacuuuuuaguuuu

SEQ ID NO: 3146 - RNA, 19 nt, Artificial Sequence
  Description of Artificial Sequence: Synthetic oligonucleotide
aauucacuuuuuaguuuuc

SEQ ID NO: 3147 - RNA, 19 nt, Artificial Sequence
  Description of Artificial Sequence: Synthetic oligonucleotide
auucacuuuuuaguuuucu

SEQ ID NO: 3148 - RNA, 19 nt, Artificial Sequence
  Description of Artificial Sequence: Synthetic oligonucleotide
uucacuuuuuaguuuucuu

SEQ ID NO: 3149 - RNA, 19 nt, Artificial Sequence
  Description of Artificial Sequence: Synthetic oligonucleotide
ucacuuuuuaguuuucuuu

SEQ ID NO: 3150 - RNA, 19 nt, Artificial Sequence
  Description of Artificial Sequence: Synthetic oligonucleotide
cacuuuuuaguuuucuuuu

SEQ ID NO: 3151 - RNA, 19 nt, Artificial Sequence
  Description of Artificial Sequence: Synthetic oligonucleotide
acuuuuuaguuuucuuuua

SEQ ID NO: 3152 - RNA, 19 nt, Artificial Sequence
  Description of Artificial Sequence: Synthetic oligonucleotide
cuuuuuaguuuucuuuuac

SEQ ID NO: 3153 - RNA, 19 nt, Artificial Sequence
  Description of Artificial Sequence: Synthetic oligonucleotide
uuuuuaguuuucuuuuacu

SEQ ID NO: 3154 - RNA, 19 nt, Artificial Sequence
  Description of Artificial Sequence: Synthetic oligonucleotide
uuuuaguuuucuuuuacuu

SEQ ID NO: 3155 - RNA, 19 nt, Artificial Sequence
  Description of Artificial Sequence: Synthetic oligonucleotide
uuuaguuuucuuuuacuua

SEQ ID NO: 3156 - RNA, 19 nt, Artificial Sequence
  Description of Artificial Sequence: Synthetic oligonucleotide
uuaguuuucuuuuacuuaa

SEQ ID NO: 3157 - RNA, 19 nt, Artificial Sequence
  Description of Artificial Sequence: Synthetic oligonucleotide
uaguuuucuuuuacuuaaa

SEQ ID NO: 3158 - RNA, 19 nt, Artificial Sequence
  Description of Artificial Sequence: Synthetic oligonucleotide
aguuuucuuuuacuuaaau

SEQ ID NO: 3159 - RNA, 19 nt, Artificial Sequence
  Description of Artificial Sequence: Synthetic oligonucleotide
guuuucuuuuacuuaaauc

SEQ ID NO: 3160 - RNA, 19 nt, Artificial Sequence
  Description of Artificial Sequence: Synthetic oligonucleotide
uuuucuuuuacuuaaaucc

SEQ ID NO: 3161 - RNA, 19 nt, Artificial Sequence
  Description of Artificial Sequence: Synthetic oligonucleotide
uuucuuuuacuuaaauccc

SEQ ID NO: 3162 - RNA, 19 nt, Artificial Sequence
  Description of Artificial Sequence: Synthetic oligonucleotide
uucuuuuacuuaaauccca

SEQ ID NO: 3163 - RNA, 19 nt, Artificial Sequence
  Description of Artificial Sequence: Synthetic oligonucleotide
ucuuuuacuuaaaucccau

SEQ ID NO: 3164 - RNA, 19 nt, Artificial Sequence
  Description of Artificial Sequence: Synthetic oligonucleotide
cuuuuacuuaaaucccauc

SEQ ID NO: 3165 - RNA, 19 nt, Artificial Sequence
  Description of Artificial Sequence: Synthetic oligonucleotide
uuuuacuuaaaucccaucu

SEQ ID NO: 3166 - RNA, 19 nt, Artificial Sequence
  Description of Artificial Sequence: Synthetic oligonucleotide
uuuacuuaaaucccaucug

SEQ ID NO: 3167 - RNA, 19 nt, Artificial Sequence
  Description of Artificial Sequence: Synthetic oligonucleotide
uuacuuaaaucccaucugc

SEQ ID NO: 3168 - RNA, 19 nt, Artificial Sequence
  Description of Artificial Sequence: Synthetic oligonucleotide
uacuuaaaucccaucugca

SEQ ID NO: 3169 - RNA, 19 nt, Artificial Sequence
  Description of Artificial Sequence: Synthetic oligonucleotide
acuuaaaucccaucugcag

SEQ ID NO: 3170 - RNA, 19 nt, Artificial Sequence
  Description of Artificial Sequence: Synthetic oligonucleotide
cuuaaaucccaucugcagu

SEQ ID NO: 3171 - RNA, 19 nt, Artificial Sequence
  Description of Artificial Sequence: Synthetic oligonucleotide
uuaaaucccaucugcaguc

SEQ ID NO: 3172 - RNA, 19 nt, Artificial Sequence
  Description of Artificial Sequence: Synthetic oligonucleotide
uaaaucccaucugcagucu

SEQ ID NO: 3173 - RNA, 19 nt, Artificial Sequence
  Description of Artificial Sequence: Synthetic oligonucleotide
aaaucccaucugcagucuc

SEQ ID NO: 3174 - RNA, 19 nt, Artificial Sequence
  Description of Artificial Sequence: Synthetic oligonucleotide
aaucccaucugcagucuca

SEQ ID NO: 3175 - RNA, 19 nt, Artificial Sequence
  Description of Artificial Sequence: Synthetic oligonucleotide
aucccaucugcagucucaa

SEQ ID NO: 3176 - RNA, 19 nt, Artificial Sequence
  Description of Artificial Sequence: Synthetic oligonucleotide
ucccaucugcagucucaaa

SEQ ID NO: 3177 - RNA, 19 nt, Artificial Sequence
  Description of Artificial Sequence: Synthetic oligonucleotide
cccaucugcagucucaaau

SEQ ID NO: 3178 - RNA, 19 nt, Artificial Sequence
  Description of Artificial Sequence: Synthetic oligonucleotide
ccaucugcagucucaaauu

SEQ ID NO: 3179 - RNA, 19 nt, Artificial Sequence
  Description of Artificial Sequence: Synthetic oligonucleotide
caucugcagucucaaauuu

SEQ ID NO: 3180 - RNA, 19 nt, Artificial Sequence
  Description of Artificial Sequence: Synthetic oligonucleotide
aucugcagucucaaauuua

SEQ ID NO: 3181 - RNA, 19 nt, Artificial Sequence
  Description of Artificial Sequence: Synthetic oligonucleotide
ucugcagucucaaauuuaa

SEQ ID NO: 3182 - RNA, 19 nt, Artificial Sequence
  Description of Artificial Sequence: Synthetic oligonucleotide
cugcagucucaaauuuaag

SEQ ID NO: 3183 - RNA, 19 nt, Artificial Sequence
  Description of Artificial Sequence: Synthetic oligonucleotide
ugcagucucaaauuuaagu

SEQ ID NO: 3184 - RNA, 19 nt, Artificial Sequence
  Description of Artificial Sequence: Synthetic oligonucleotide
gcagucucaaauuuaaguu

SEQ ID NO: 3185 - RNA, 19 nt, Artificial Sequence
  Description of Artificial Sequence: Synthetic oligonucleotide
cagucucaaauuuaaguuc

SEQ ID NO: 3186 - RNA, 19 nt, Artificial Sequence
  Description of Artificial Sequence: Synthetic oligonucleotide
agucucaaauuuaaguucu

SEQ ID NO: 3187 - RNA, 19 nt, Artificial Sequence
  Description of Artificial Sequence: Synthetic oligonucleotide
gucucaaauuuaaguucuc

SEQ ID NO: 3188 - RNA, 19 nt, Artificial Sequence
  Description of Artificial Sequence: Synthetic oligonucleotide
ucucaaauuuaaguucucc

SEQ ID NO: 3189 - RNA, 19 nt, Artificial Sequence
  Description of Artificial Sequence: Synthetic oligonucleotide
cucaaauuuaaguucuccc

SEQ ID NO: 3190 - RNA, 19 nt, Artificial Sequence
  Description of Artificial Sequence: Synthetic oligonucleotide
ucaaauuuaaguucuccca

SEQ ID NO: 3191 - RNA, 19 nt, Artificial Sequence
  Description of Artificial Sequence: Synthetic oligonucleotide
caaauuuaaguucucccag

SEQ ID NO: 3192 - RNA, 19 nt, Artificial Sequence
  Description of Artificial Sequence: Synthetic oligonucleotide
aaauuuaaguucucccagu

SEQ ID NO: 3193 - RNA, 19 nt, Artificial Sequence
  Description of Artificial Sequence: Synthetic oligonucleotide
aauuuaaguucucccagua

SEQ ID NO: 3194 - RNA, 19 nt, Artificial Sequence
  Description of Artificial Sequence: Synthetic oligonucleotide
auuuaaguucucccaguag

SEQ ID NO: 3195 - RNA, 19 nt, Artificial Sequence
  Description of Artificial Sequence: Synthetic oligonucleotide
uuuaaguucucccaguaga

SEQ ID NO: 3196 - RNA, 19 nt, Artificial Sequence
  Description of Artificial Sequence: Synthetic oligonucleotide
uuaaguucucccaguagag

SEQ ID NO: 3197 - RNA, 19 nt, Artificial Sequence
  Description of Artificial Sequence: Synthetic oligonucleotide
uaaguucucccaguagaga

SEQ ID NO: 3198 - RNA, 19 nt, Artificial Sequence
  Description of Artificial Sequence: Synthetic oligonucleotide
aaguucucccaguagagau

SEQ ID NO: 3199 - RNA, 19 nt, Artificial Sequence
  Description of Artificial Sequence: Synthetic oligonucleotide
aguucucccaguagagauu

SEQ ID NO: 3200 - RNA, 19 nt, Artificial Sequence
  Description of Artificial Sequence: Synthetic oligonucleotide
guucucccaguagagauug

SEQ ID NO: 3201 - RNA, 19 nt, Artificial Sequence
  Description of Artificial Sequence: Synthetic oligonucleotide
uucucccaguagagauuga

SEQ ID NO: 3202 - RNA, 19 nt, Artificial Sequence
  Description of Artificial Sequence: Synthetic oligonucleotide
ucucccaguagagauugag

SEQ ID NO: 3203 - RNA, 19 nt, Artificial Sequence
  Description of Artificial Sequence: Synthetic oligonucleotide
cucccaguagagauugagu

SEQ ID NO: 3204 - RNA, 19 nt, Artificial Sequence
  Description of Artificial Sequence: Synthetic oligonucleotide
ucccaguagagauugaguu

SEQ ID NO: 3205 - RNA, 19 nt, Artificial Sequence
  Description of Artificial Sequence: Synthetic oligonucleotide
cccaguagagauugaguuu

SEQ ID NO: 3206 - RNA, 19 nt, Artificial Sequence
  Description of Artificial Sequence: Synthetic oligonucleotide
ccaguagagauugaguuug

SEQ ID NO: 3207 - RNA, 19 nt, Artificial Sequence
  Description of Artificial Sequence: Synthetic oligonucleotide
caguagagauugaguuuga

SEQ ID NO: 3208 - RNA, 19 nt, Artificial Sequence
  Description of Artificial Sequence: Synthetic oligonucleotide
aguagagauugaguuugag

SEQ ID NO: 3209 - RNA, 19 nt, Artificial Sequence
  Description of Artificial Sequence: Synthetic oligonucleotide
guagagauugaguuugagc

SEQ ID NO: 3210 - RNA, 19 nt, Artificial Sequence
  Description of Artificial Sequence: Synthetic oligonucleotide
uagagauugaguuugagcc

SEQ ID NO: 3211 - RNA, 19 nt, Artificial Sequence
  Description of Artificial Sequence: Synthetic oligonucleotide
agagauugaguuugagccu

SEQ ID NO: 3212 - RNA, 19 nt, Artificial Sequence
  Description of Artificial Sequence: Synthetic oligonucleotide
gagauugaguuugagccug

SEQ ID NO: 3213 - RNA, 19 nt, Artificial Sequence
  Description of Artificial Sequence: Synthetic oligonucleotide
agauugaguuugagccugu

SEQ ID NO: 3214 - RNA, 19 nt, Artificial Sequence
  Description of Artificial Sequence: Synthetic oligonucleotide
gauugaguuugagccugua

SEQ ID NO: 3215 - RNA, 19 nt, Artificial Sequence
  Description of Artificial Sequence: Synthetic oligonucleotide
auugaguuugagccuguau

SEQ ID NO: 3216 - RNA, 19 nt, Artificial Sequence
  Description of Artificial Sequence: Synthetic oligonucleotide
uugaguuugagccuguaua

SEQ ID NO: 3217 - RNA, 19 nt, Artificial Sequence
  Description of Artificial Sequence: Synthetic oligonucleotide
ugaguuugagccuguauau

SEQ ID NO: 3218 - RNA, 19 nt, Artificial Sequence
  Description of Artificial Sequence: Synthetic oligonucleotide
gaguuugagccuguauauc

SEQ ID NO: 3219 - RNA, 19 nt, Artificial Sequence
  Description of Artificial Sequence: Synthetic oligonucleotide
aguuugagccuguauaucu

SEQ ID NO: 3220 - RNA, 19 nt, Artificial Sequence
  Description of Artificial Sequence: Synthetic oligonucleotide
guuugagccuguauaucua

SEQ ID NO: 3221 - RNA, 19 nt, Artificial Sequence
  Description of Artificial Sequence: Synthetic oligonucleotide
uuugagccuguauaucuau

SEQ ID NO: 3222 - RNA, 19 nt, Artificial Sequence
  Description of Artificial Sequence: Synthetic oligonucleotide
uugagccuguauaucuauu

SEQ ID NO: 3223 - RNA, 19 nt, Artificial Sequence
  Description of Artificial Sequence: Synthetic oligonucleotide
ugagccuguauaucuauua

SEQ ID NO: 3224 - RNA, 19 nt, Artificial Sequence
  Description of Artificial Sequence: Synthetic oligonucleotide
gagccuguauaucuauuaa

SEQ ID NO: 3225 - RNA, 19 nt, Artificial Sequence
  Description of Artificial Sequence: Synthetic oligonucleotide
agccuguauaucuauuaaa

SEQ ID NO: 3226 - RNA, 19 nt, Artificial Sequence
  Description of Artificial Sequence: Synthetic oligonucleotide
gccuguauaucuauuaaaa

SEQ ID NO: 3227 - RNA, 19 nt, Artificial Sequence
  Description of Artificial Sequence: Synthetic oligonucleotide
ccuguauaucuauuaaaaa

SEQ ID NO: 3228 - RNA, 19 nt, Artificial Sequence
  Description of Artificial Sequence: Synthetic oligonucleotide
cuguauaucuauuaaaaau

SEQ ID NO: 3229 - RNA, 19 nt, Artificial Sequence
  Description of Artificial Sequence: Synthetic oligonucleotide
uguauaucuauuaaaaauu

SEQ ID NO: 3230 - RNA, 19 nt, Artificial Sequence
  Description of Artificial Sequence: Synthetic oligonucleotide
guauaucuauuaaaaauuu

SEQ ID NO: 3231 - RNA, 19 nt, Artificial Sequence
  Description of Artificial Sequence: Synthetic oligonucleotide
uauaucuauuaaaaauuuc

SEQ ID NO: 3232 - RNA, 19 nt, Artificial Sequence
  Description of Artificial Sequence: Synthetic oligonucleotide
auaucuauuaaaaauuuca

SEQ ID NO: 3233 - RNA, 19 nt, Artificial Sequence
  Description of Artificial Sequence: Synthetic oligonucleotide
uaucuauuaaaaauuucaa

SEQ ID NO: 3234 - RNA, 19 nt, Artificial Sequence
  Description of Artificial Sequence: Synthetic oligonucleotide
aucuauuaaaaauuucaac

SEQ ID NO: 3235 - RNA, 19 nt, Artificial Sequence
  Description of Artificial Sequence: Synthetic oligonucleotide
ucuauuaaaaauuucaacu

SEQ ID NO: 3236 - RNA, 19 nt, Artificial Sequence
  Description of Artificial Sequence: Synthetic oligonucleotide
cuauuaaaaauuucaacuu

SEQ ID NO: 3237 - RNA, 19 nt, Artificial Sequence
  Description of Artificial Sequence: Synthetic oligonucleotide
uauuaaaaauuucaacuuc

SEQ ID NO: 3238 - RNA, 19 nt, Artificial Sequence
  Description of Artificial Sequence: Synthetic oligonucleotide
auuaaaaauuucaacuucc

SEQ ID NO: 3239 - RNA, 19 nt, Artificial Sequence
  Description of Artificial Sequence: Synthetic oligonucleotide
uuaaaaauuucaacuuccc

SEQ ID NO: 3240 - RNA, 19 nt, Artificial Sequence
  Description of Artificial Sequence: Synthetic oligonucleotide
uaaaaauuucaacuuccca

SEQ ID NO: 3241 - RNA, 19 nt, Artificial Sequence
  Description of Artificial Sequence: Synthetic oligonucleotide
aaaaauuucaacuucccac

SEQ ID NO: 3242 - RNA, 19 nt, Artificial Sequence
  Description of Artificial Sequence: Synthetic oligonucleotide
aaaauuucaacuucccaca

SEQ ID NO: 3243 - RNA, 19 nt, Artificial Sequence
  Description of Artificial Sequence: Synthetic oligonucleotide
aaauuucaacuucccacau

SEQ ID NO: 3244 - RNA, 19 nt, Artificial Sequence
  Description of Artificial Sequence: Synthetic oligonucleotide
aauuucaacuucccacaua

SEQ ID NO: 3245 - RNA, 19 nt, Artificial Sequence
  Description of Artificial Sequence: Synthetic oligonucleotide
auuucaacuucccacauau

SEQ ID NO: 3246 - RNA, 19 nt, Artificial Sequence
  Description of Artificial Sequence: Synthetic oligonucleotide
uuucaacuucccacauaua

SEQ ID NO: 3247 - RNA, 19 nt, Artificial Sequence
  Description of Artificial Sequence: Synthetic oligonucleotide
uucaacuucccacauauau

SEQ ID NO: 3248 - RNA, 19 nt, Artificial Sequence
  Description of Artificial Sequence: Synthetic oligonucleotide
ucaacuucccacauauauu

SEQ ID NO: 3249 - RNA, 19 nt, Artificial Sequence
  Description of Artificial Sequence: Synthetic oligonucleotide
caacuucccacauauauuu

SEQ ID NO: 3250 - RNA, 19 nt, Artificial Sequence
  Description of Artificial Sequence: Synthetic oligonucleotide
aacuucccacauauauuua

SEQ ID NO: 3251 - RNA, 19 nt, Artificial Sequence
  Description of Artificial Sequence: Synthetic oligonucleotide
acuucccacauauauuuac

SEQ ID NO: 3252 - RNA, 19 nt, Artificial Sequence
  Description of Artificial Sequence: Synthetic oligonucleotide
cuucccacauauauuuacu

SEQ ID NO: 3253 - RNA, 19 nt, Artificial Sequence
  Description of Artificial Sequence: Synthetic oligonucleotide
uucccacauauauuuacua

SEQ ID NO: 3254 - RNA, 19 nt, Artificial Sequence
  Description of Artificial Sequence: Synthetic oligonucleotide
ucccacauauauuuacuaa

SEQ ID NO: 3255 - RNA, 19 nt, Artificial Sequence
  Description of Artificial Sequence: Synthetic oligonucleotide
cccacauauauuuacuaag

SEQ ID NO: 3256 - RNA, 19 nt, Artificial Sequence
  Description of Artificial Sequence: Synthetic oligonucleotide
ccacauauauuuacuaaga

SEQ ID NO: 3257 - RNA, 19 nt, Artificial Sequence
  Description of Artificial Sequence: Synthetic oligonucleotide
cacauauauuuacuaagau

SEQ ID NO: 3258 - RNA, 19 nt, Artificial Sequence
  Description of Artificial Sequence: Synthetic oligonucleotide
acauauauuuacuaagaug

SEQ ID NO: 3259 - RNA, 19 nt, Artificial Sequence
  Description of Artificial Sequence: Synthetic oligonucleotide
cauauauuuacuaagauga

SEQ ID NO: 3260 - RNA, 19 nt, Artificial Sequence
  Description of Artificial Sequence: Synthetic oligonucleotide
auauauuuacuaagaugau

SEQ ID NO: 3261 - RNA, 19 nt, Artificial Sequence
  Description of Artificial Sequence: Synthetic oligonucleotide
uauauuuacuaagaugauu

SEQ ID NO: 3262 - RNA, 19 nt, Artificial Sequence
  Description of Artificial Sequence: Synthetic oligonucleotide
auauuuacuaagaugauua

SEQ ID NO: 3263 - RNA, 19 nt, Artificial Sequence
  Description of Artificial Sequence: Synthetic oligonucleotide
uauuuacuaagaugauuaa

SEQ ID NO: 3264 - RNA, 19 nt, Artificial Sequence
  Description of Artificial Sequence: Synthetic oligonucleotide
auuuacuaagaugauuaag

SEQ ID NO: 3265 - RNA, 19 nt, Artificial Sequence
  Description of Artificial Sequence: Synthetic oligonucleotide
uuuacuaagaugauuaaga

SEQ ID NO: 3266 - RNA, 19 nt, Artificial Sequence
  Description of Artificial Sequence: Synthetic oligonucleotide
uuacuaagaugauuaagac

SEQ ID NO: 3267 - RNA, 19 nt, Artificial Sequence
  Description of Artificial Sequence: Synthetic oligonucleotide
uacuaagaugauuaagacu

SEQ ID NO: 3268 - RNA, 19 nt, Artificial Sequence
  Description of Artificial Sequence: Synthetic oligonucleotide
acuaagaugauuaagacuu

SEQ ID NO: 3269 - RNA, 19 nt, Artificial Sequence
  Description of Artificial Sequence: Synthetic oligonucleotide
cuaagaugauuaagacuua

SEQ ID NO: 3270 - RNA, 19 nt, Artificial Sequence
  Description of Artificial Sequence: Synthetic oligonucleotide
uaagaugauuaagacuuac

SEQ ID NO: 3271 - RNA, 19 nt, Artificial Sequence
  Description of Artificial Sequence: Synthetic oligonucleotide
aagaugauuaagacuuaca

SEQ ID NO: 3272 - RNA, 19 nt, Artificial Sequence
  Description of Artificial Sequence: Synthetic oligonucleotide
agaugauuaagacuuacau

SEQ ID NO: 3273 - RNA, 19 nt, Artificial Sequence
  Description of Artificial Sequence: Synthetic oligonucleotide
gaugauuaagacuuacauu

SEQ ID NO: 3274 - RNA, 19 nt, Artificial Sequence
  Description of Artificial Sequence: Synthetic oligonucleotide
augauuaagacuuacauuu

SEQ ID NO: 3275 - RNA, 19 nt, Artificial Sequence
  Description of Artificial Sequence: Synthetic oligonucleotide
ugauuaagacuuacauuuu

SEQ ID NO: 3276 - RNA, 19 nt, Artificial Sequence
  Description of Artificial Sequence: Synthetic oligonucleotide
gauuaagacuuacauuuuc

SEQ ID NO: 3277 - RNA, 19 nt, Artificial Sequence
  Description of Artificial Sequence: Synthetic oligonucleotide
auuaagacuuacauuuucu

SEQ ID NO: 3278 - RNA, 19 nt, Artificial Sequence
  Description of Artificial Sequence: Synthetic oligonucleotide
uuaagacuuacauuuucug

SEQ ID NO: 3279 - RNA, 19 nt, Artificial Sequence
  Description of Artificial Sequence: Synthetic oligonucleotide
uaagacuuacauuuucugc

SEQ ID NO: 3280 - RNA, 19 nt, Artificial Sequence
  Description of Artificial Sequence: Synthetic oligonucleotide
aagacuuacauuuucugca

SEQ ID NO: 3281 - RNA, 19 nt, Artificial Sequence
  Description of Artificial Sequence: Synthetic oligonucleotide
agacuuacauuuucugcac

SEQ ID NO: 3282 - RNA, 19 nt, Artificial Sequence
  Description of Artificial Sequence: Synthetic oligonucleotide
gacuuacauuuucugcaca

SEQ ID NO: 3283 - RNA, 19 nt, Artificial Sequence
  Description of Artificial Sequence: Synthetic oligonucleotide
acuuacauuuucugcacag

SEQ ID NO: 3284 - RNA, 19 nt, Artificial Sequence
  Description of Artificial Sequence: Synthetic oligonucleotide
cuuacauuuucugcacagg

SEQ ID NO: 3285 - RNA, 19 nt, Artificial Sequence
  Description of Artificial Sequence: Synthetic oligonucleotide
uuacauuuucugcacaggu

SEQ ID NO: 3286 - RNA, 19 nt, Artificial Sequence
  Description of Artificial Sequence: Synthetic oligonucleotide
uacauuuucugcacagguc

SEQ ID NO: 3287 - RNA, 19 nt, Artificial Sequence
  Description of Artificial Sequence: Synthetic oligonucleotide
acauuuucugcacaggucu

SEQ ID NO: 3288 - RNA, 19 nt, Artificial Sequence
  Description of Artificial Sequence: Synthetic oligonucleotide
cauuuucugcacaggucug

SEQ ID NO: 3289 - RNA, 19 nt, Artificial Sequence
  Description of Artificial Sequence: Synthetic oligonucleotide
auuuucugcacaggucugc

SEQ ID NO: 3290 - RNA, 19 nt, Artificial Sequence
  Description of Artificial Sequence: Synthetic oligonucleotide
uuuucugcacaggucugca

SEQ ID NO: 3291 - RNA, 19 nt, Artificial Sequence
  Description of Artificial Sequence: Synthetic oligonucleotide
uuucugcacaggucugcaa

SEQ ID NO: 3292 - RNA, 19 nt, Artificial Sequence
  Description of Artificial Sequence: Synthetic oligonucleotide
uucugcacaggucugcaaa

SEQ ID NO: 3293 - RNA, 19 nt, Artificial Sequence
  Description of Artificial Sequence: Synthetic oligonucleotide
ucugcacaggucugcaaaa

SEQ ID NO: 3294 - RNA, 19 nt, Artificial Sequence
  Description of Artificial Sequence: Synthetic oligonucleotide
cugcacaggucugcaaaaa

SEQ ID NO: 3295 - RNA, 19 nt, Artificial Sequence
  Description of Artificial Sequence: Synthetic oligonucleotide
ugcacaggucugcaaaaac

SEQ ID NO: 3296 - RNA, 19 nt, Artificial Sequence
  Description of Artificial Sequence: Synthetic oligonucleotide
gcacaggucugcaaaaaca

SEQ ID NO: 3297 - RNA, 19 nt, Artificial Sequence
  Description of Artificial Sequence: Synthetic oligonucleotide
cacaggucugcaaaaacaa

SEQ ID NO: 3298 - RNA, 19 nt, Artificial Sequence
  Description of Artificial Sequence: Synthetic oligonucleotide
acaggucugcaaaaacaaa

SEQ ID NO: 3299 - RNA, 19 nt, Artificial Sequence
  Description of Artificial Sequence: Synthetic oligonucleotide
caggucugcaaaaacaaaa

SEQ ID NO: 3300 - RNA, 19 nt, Artificial Sequence
  Description of Artificial Sequence: Synthetic oligonucleotide
aggucugcaaaaacaaaaa

SEQ ID NO: 3301 - RNA, 19 nt, Artificial Sequence
  Description of Artificial Sequence: Synthetic oligonucleotide
ggucugcaaaaacaaaaau

SEQ ID NO: 3302 - RNA, 19 nt, Artificial Sequence
  Description of Artificial Sequence: Synthetic oligonucleotide
gucugcaaaaacaaaaauu

SEQ ID NO: 3303 - RNA, 19 nt, Artificial Sequence
  Description of Artificial Sequence: Synthetic oligonucleotide
ucugcaaaaacaaaaauua

SEQ ID NO: 3304 - RNA, 19 nt, Artificial Sequence
  Description of Artificial Sequence: Synthetic oligonucleotide
cugcaaaaacaaaaauuau

SEQ ID NO: 3305 - RNA, 19 nt, Artificial Sequence
  Description of Artificial Sequence: Synthetic oligonucleotide
ugcaaaaacaaaaauuaua

SEQ ID NO: 3306 - RNA, 19 nt, Artificial Sequence
  Description of Artificial Sequence: Synthetic oligonucleotide
gcaaaaacaaaaauuauaa

SEQ ID NO: 3307 - RNA, 19 nt, Artificial Sequence
  Description of Artificial Sequence: Synthetic oligonucleotide
caaaaacaaaaauuauaaa

SEQ ID NO: 3308 - RNA, 19 nt, Artificial Sequence
  Description of Artificial Sequence: Synthetic oligonucleotide
aaaaacaaaaauuauaaac

SEQ ID NO: 3309 - RNA, 19 nt, Artificial Sequence
  Description of Artificial Sequence: Synthetic oligonucleotide
aaaacaaaaauuauaaacu

SEQ ID NO: 3310 - RNA, 19 nt, Artificial Sequence
  Description of Artificial Sequence: Synthetic oligonucleotide
aaacaaaaauuauaaacua

SEQ ID NO: 3311 - RNA, 19 nt, Artificial Sequence
  Description of Artificial Sequence: Synthetic oligonucleotide
aacaaaaauuauaaacuag

SEQ ID NO: 3312 - RNA, 19 nt, Artificial Sequence
  Description of Artificial Sequence: Synthetic oligonucleotide
acaaaaauuauaaacuagu

SEQ ID NO: 3313 - RNA, 19 nt, Artificial Sequence
  Description of Artificial Sequence: Synthetic oligonucleotide
caaaaauuauaaacuaguc

SEQ ID NO: 3314 - RNA, 19 nt, Artificial Sequence
  Description of Artificial Sequence: Synthetic oligonucleotide
aaaaauuauaaacuagucc

SEQ ID NO: 3315 - RNA, 19 nt, Artificial Sequence
  Description of Artificial Sequence: Synthetic oligonucleotide
aaaauuauaaacuagucca

SEQ ID NO: 3316 - RNA, 19 nt, Artificial Sequence
  Description of Artificial Sequence: Synthetic oligonucleotide
aaauuauaaacuaguccau

SEQ ID NO: 3317 - RNA, 19 nt, Artificial Sequence
  Description of Artificial Sequence: Synthetic oligonucleotide
aauuauaaacuaguccauc

SEQ ID NO: 3318 - RNA, 19 nt, Artificial Sequence
  Description of Artificial Sequence: Synthetic oligonucleotide
auuauaaacuaguccaucc

SEQ ID NO: 3319 - RNA, 19 nt, Artificial Sequence
  Description of Artificial Sequence: Synthetic oligonucleotide
uuauaaacuaguccaucca

SEQ ID NO: 3320 - RNA, 19 nt, Artificial Sequence
  Description of Artificial Sequence: Synthetic oligonucleotide
uauaaacuaguccauccaa

SEQ ID NO: 3321 - RNA, 19 nt, Artificial Sequence
  Description of Artificial Sequence: Synthetic oligonucleotide
auaaacuaguccauccaag

SEQ ID NO: 3322 - RNA, 19 nt, Artificial Sequence
  Description of Artificial Sequence: Synthetic oligonucleotide
uaaacuaguccauccaaga

SEQ ID NO: 3323 - RNA, 19 nt, Artificial Sequence
  Description of Artificial Sequence: Synthetic oligonucleotide
aaacuaguccauccaagaa

SEQ ID NO: 3324 - RNA, 19 nt, Artificial Sequence
  Description of Artificial Sequence: Synthetic oligonucleotide
aacuaguccauccaagaac

SEQ ID NO: 3325 - RNA, 19 nt, Artificial Sequence
  Description of Artificial Sequence: Synthetic oligonucleotide
acuaguccauccaagaacc

SEQ ID NO: 3326 - RNA, 19 nt, Artificial Sequence
  Description of Artificial Sequence: Synthetic oligonucleotide
cuaguccauccaagaacca

SEQ ID NO: 3327 - RNA, 19 nt, Artificial Sequence
  Description of Artificial Sequence: Synthetic oligonucleotide
uaguccauccaagaaccaa

SEQ ID NO: 3328 - RNA, 19 nt, Artificial Sequence
  Description of Artificial Sequence: Synthetic oligonucleotide
aguccauccaagaaccaaa

SEQ ID NO: 3329 - RNA, 19 nt, Artificial Sequence
  Description of Artificial Sequence: Synthetic oligonucleotide
guccauccaagaaccaaag

SEQ ID NO: 3330 - RNA, 19 nt, Artificial Sequence
  Description of Artificial Sequence: Synthetic oligonucleotide
uccauccaagaaccaaagu

SEQ ID NO: 3331 - RNA, 19 nt, Artificial Sequence
  Description of Artificial Sequence: Synthetic oligonucleotide
ccauccaagaaccaaaguu

SEQ ID NO: 3332 - RNA, 19 nt, Artificial Sequence
  Description of Artificial Sequence: Synthetic oligonucleotide
cauccaagaaccaaaguuu

SEQ ID NO: 3333 - RNA, 19 nt, Artificial Sequence
  Description of Artificial Sequence: Synthetic oligonucleotide
auccaagaaccaaaguuug

SEQ ID NO: 3334 - RNA, 19 nt, Artificial Sequence
  Description of Artificial Sequence: Synthetic oligonucleotide
uccaagaaccaaaguuugu

SEQ ID NO: 3335 - RNA, 19 nt, Artificial Sequence
  Description of Artificial Sequence: Synthetic oligonucleotide
ccaagaaccaaaguuugua

SEQ ID NO: 3336 - RNA, 19 nt, Artificial Sequence
  Description of Artificial Sequence: Synthetic oligonucleotide
caagaaccaaaguuuguau

SEQ ID NO: 3337 - RNA, 19 nt, Artificial Sequence
  Description of Artificial Sequence: Synthetic oligonucleotide
aagaaccaaaguuuguaua

SEQ ID NO: 3338 - RNA, 19 nt, Artificial Sequence
  Description of Artificial Sequence: Synthetic oligonucleotide
agaaccaaaguuuguauaa

SEQ ID NO: 3339 - RNA, 19 nt, Artificial Sequence
  Description of Artificial Sequence: Synthetic oligonucleotide
gaaccaaaguuuguauaaa

SEQ ID NO: 3340 - RNA, 19 nt, Artificial Sequence
  Description of Artificial Sequence: Synthetic oligonucleotide
aaccaaaguuuguauaaac

SEQ ID NO: 3341 - RNA, 19 nt, Artificial Sequence
  Description of Artificial Sequence: Synthetic oligonucleotide
accaaaguuuguauaaaca

SEQ ID NO: 3342 - RNA, 19 nt, Artificial Sequence
  Description of Artificial Sequence: Synthetic oligonucleotide
ccaaaguuuguauaaacag

SEQ ID NO: 3343 - RNA, 19 nt, Artificial Sequence
  Description of Artificial Sequence: Synthetic oligonucleotide
caaaguuuguauaaacagg

SEQ ID NO: 3344 - RNA, 19 nt, Artificial Sequence
  Description of Artificial Sequence: Synthetic oligonucleotide
aaaguuuguauaaacaggu

SEQ ID NO: 3345 - RNA, 19 nt, Artificial Sequence
  Description of Artificial Sequence: Synthetic oligonucleotide
aaguuuguauaaacagguu

SEQ ID NO: 3346 - RNA, 19 nt, Artificial Sequence
  Description of Artificial Sequence: Synthetic oligonucleotide
aguuuguauaaacagguug

SEQ ID NO: 3347 - RNA, 19 nt, Artificial Sequence
  Description of Artificial Sequence: Synthetic oligonucleotide
guuuguauaaacagguugc

SEQ ID NO: 3348 - RNA, 19 nt, Artificial Sequence
  Description of Artificial Sequence: Synthetic oligonucleotide
uuuguauaaacagguugcu

SEQ ID NO: 3349 - RNA, 19 nt, Artificial Sequence
  Description of Artificial Sequence: Synthetic oligonucleotide
uuguauaaacagguugcua

SEQ ID NO: 3350 - RNA, 19 nt, Artificial Sequence
  Description of Artificial Sequence: Synthetic oligonucleotide
uguauaaacagguugcuau

SEQ ID NO: 3351 - RNA, 19 nt, Artificial Sequence
  Description of Artificial Sequence: Synthetic oligonucleotide
guauaaacagguugcuaua

SEQ ID NO: 3352 - RNA, 19 nt, Artificial Sequence
  Description of Artificial Sequence: Synthetic oligonucleotide
uauaaacagguugcuauaa

SEQ ID NO: 3353 - RNA, 19 nt, Artificial Sequence
  Description of Artificial Sequence: Synthetic oligonucleotide
auaaacagguugcuauaag

SEQ ID NO: 3354 - RNA, 19 nt, Artificial Sequence
  Description of Artificial Sequence: Synthetic oligonucleotide
uaaacagguugcuauaagc

SEQ ID NO: 3355 - RNA, 19 nt, Artificial Sequence
  Description of Artificial Sequence: Synthetic oligonucleotide
aaacagguugcuauaagcu

SEQ ID NO: 3356 - RNA, 19 nt, Artificial Sequence
  Description of Artificial Sequence: Synthetic oligonucleotide
aacagguugcuauaagcuu

SEQ ID NO: 3357 - RNA, 19 nt, Artificial Sequence
  Description of Artificial Sequence: Synthetic oligonucleotide
acagguugcuauaagcuug

SEQ ID NO: 3358 - RNA, 19 nt, Artificial Sequence
  Description of Artificial Sequence: Synthetic oligonucleotide
cagguugcuauaagcuugg

SEQ ID NO: 3359 - RNA, 19 nt, Artificial Sequence
  Description of Artificial Sequence: Synthetic oligonucleotide
agguugcuauaagcuuggu

SEQ ID NO: 3360 - RNA, 19 nt, Artificial Sequence
  Description of Artificial Sequence: Synthetic oligonucleotide
gguugcuauaagcuuggug

SEQ ID NO: 3361 - RNA, 19 nt, Artificial Sequence
  Description of Artificial Sequence: Synthetic oligonucleotide
guugcuauaagcuugguga

SEQ ID NO: 3362 - RNA, 19 nt, Artificial Sequence
  Description of Artificial Sequence: Synthetic oligonucleotide
uugcuauaagcuuggugaa

SEQ ID NO: 3363 - RNA, 19 nt, Artificial Sequence
  Description of Artificial Sequence: Synthetic oligonucleotide
ugcuauaagcuuggugaaa

SEQ ID NO: 3364 - RNA, 19 nt, Artificial Sequence
  Description of Artificial Sequence: Synthetic oligonucleotide
gcuauaagcuuggugaaau

SEQ ID NO: 3365 - RNA, 19 nt, Artificial Sequence
  Description of Artificial Sequence: Synthetic oligonucleotide
cuauaagcuuggugaaaug

SEQ ID NO: 3366 - RNA, 19 nt, Artificial Sequence
  Description of Artificial Sequence: Synthetic oligonucleotide
uauaagcuuggugaaauga

SEQ ID NO: 3367 - RNA, 19 nt, Artificial Sequence
  Description of Artificial Sequence: Synthetic oligonucleotide
auaagcuuggugaaaugaa

SEQ ID NO: 3368 - RNA, 19 nt, Artificial Sequence
  Description of Artificial Sequence: Synthetic oligonucleotide
uaagcuuggugaaaugaaa

SEQ ID NO: 3369 - RNA, 19 nt, Artificial Sequence
  Description of Artificial Sequence: Synthetic oligonucleotide
aagcuuggugaaaugaaaa

SEQ ID NO: 3370 - RNA, 19 nt, Artificial Sequence
  Description of Artificial Sequence: Synthetic oligonucleotide
agcuuggugaaaugaaaau

SEQ ID NO: 3371 - RNA, 19 nt, Artificial Sequence
  Description of Artificial Sequence: Synthetic oligonucleotide
gcuuggugaaaugaaaaug

SEQ ID NO: 3372 - RNA, 19 nt, Artificial Sequence
  Description of Artificial Sequence: Synthetic oligonucleotide
cuuggugaaaugaaaaugg

SEQ ID NO: 3373 - RNA, 19 nt, Artificial Sequence
  Description of Artificial Sequence: Synthetic oligonucleotide
uuggugaaaugaaaaugga

SEQ ID NO: 3374 - RNA, 19 nt, Artificial Sequence
  Description of Artificial Sequence: Synthetic oligonucleotide
uggugaaaugaaaauggaa

SEQ ID NO: 3375 - RNA, 19 nt, Artificial Sequence
  Description of Artificial Sequence: Synthetic oligonucleotide
ggugaaaugaaaauggaac

SEQ ID NO: 3376 - RNA, 19 nt, Artificial Sequence
  Description of Artificial Sequence: Synthetic oligonucleotide
gugaaaugaaaauggaaca

SEQ ID NO: 3377 - RNA, 19 nt, Artificial Sequence
  Description of Artificial Sequence: Synthetic oligonucleotide
ugaaaugaaaauggaacau

SEQ ID NO: 3378 - RNA, 19 nt, Artificial Sequence
  Description of Artificial Sequence: Synthetic oligonucleotide
gaaaugaaaauggaacauu

SEQ ID NO: 3379 - RNA, 19 nt, Artificial Sequence
  Description of Artificial Sequence: Synthetic oligonucleotide
aaaugaaaauggaacauuu

SEQ ID NO: 3380 - RNA, 19 nt, Artificial Sequence
  Description of Artificial Sequence: Synthetic oligonucleotide
aaugaaaauggaacauuuc

SEQ ID NO: 3381 - RNA, 19 nt, Artificial Sequence
  Description of Artificial Sequence: Synthetic oligonucleotide
augaaaauggaacauuuca

SEQ ID NO: 3382 - RNA, 19 nt, Artificial Sequence
  Description of Artificial Sequence: Synthetic oligonucleotide
ugaaaauggaacauuucaa

SEQ ID NO: 3383 - RNA, 19 nt, Artificial Sequence
  Description of Artificial Sequence: Synthetic oligonucleotide
gaaaauggaacauuucaau

SEQ ID NO: 3384 - RNA, 19 nt, Artificial Sequence
  Description of Artificial Sequence: Synthetic oligonucleotide
aaaauggaacauuucaauc

SEQ ID NO: 3385 - RNA, 19 nt, Artificial Sequence
  Description of Artificial Sequence: Synthetic oligonucleotide
aaauggaacauuucaauca

SEQ ID NO: 3386 - RNA, 19 nt, Artificial Sequence
  Description of Artificial Sequence: Synthetic oligonucleotide
aauggaacauuucaaucaa

SEQ ID NO: 3387 - RNA, 19 nt, Artificial Sequence
  Description of Artificial Sequence: Synthetic oligonucleotide
auggaacauuucaaucaaa

SEQ ID NO: 3388 - RNA, 19 nt, Artificial Sequence
  Description of Artificial Sequence: Synthetic oligonucleotide
uggaacauuucaaucaaac

SEQ ID NO: 3389 - RNA, 19 nt, Artificial Sequence
  Description of Artificial Sequence: Synthetic oligonucleotide
ggaacauuucaaucaaaca

SEQ ID NO: 3390 - RNA, 19 nt, Artificial Sequence
  Description of Artificial Sequence: Synthetic oligonucleotide
gaacauuucaaucaaacau

SEQ ID NO: 3391 - RNA, 19 nt, Artificial Sequence
  Description of Artificial Sequence: Synthetic oligonucleotide
aacauuucaaucaaacauu

SEQ ID NO: 3392 - RNA, 19 nt, Artificial Sequence
  Description of Artificial Sequence: Synthetic oligonucleotide
acauuucaaucaaacauuu

SEQ ID NO: 3393 - RNA, 19 nt, Artificial Sequence
  Description of Artificial Sequence: Synthetic oligonucleotide
cauuucaaucaaacauuuc

SEQ ID NO: 3394 - RNA, 19 nt, Artificial Sequence
  Description of Artificial Sequence: Synthetic oligonucleotide
auuucaaucaaacauuucc

SEQ ID NO: 3395 - RNA, 19 nt, Artificial Sequence
  Description of Artificial Sequence: Synthetic oligonucleotide
uuucaaucaaacauuuccu

SEQ ID NO: 3396 - RNA, 19 nt, Artificial Sequence
  Description of Artificial Sequence: Synthetic oligonucleotide
uucaaucaaacauuuccua

SEQ ID NO: 3397 - RNA, 19 nt, Artificial Sequence
  Description of Artificial Sequence: Synthetic oligonucleotide
ucaaucaaacauuuccuau

SEQ ID NO: 3398 - RNA, 19 nt, Artificial Sequence
  Description of Artificial Sequence: Synthetic oligonucleotide
caaucaaacauuuccuaua

SEQ ID NO: 3399 - RNA, 19 nt, Artificial Sequence
  Description of Artificial Sequence: Synthetic oligonucleotide
aaucaaacauuuccuauau

SEQ ID NO: 3400 - RNA, 19 nt, Artificial Sequence
  Description of Artificial Sequence: Synthetic oligonucleotide
aucaaacauuuccuauaua

SEQ ID NO: 3401 - RNA, 19 nt, Artificial Sequence
  Description of Artificial Sequence: Synthetic oligonucleotide
ucaaacauuuccuauauaa

SEQ ID NO: 3402 - RNA, 19 nt, Artificial Sequence
  Description of Artificial Sequence: Synthetic oligonucleotide
caaacauuuccuauauaac

SEQ ID NO: 3403 - RNA, 19 nt, Artificial Sequence
  Description of Artificial Sequence: Synthetic oligonucleotide
aaacauuuccuauauaaca

SEQ ID NO: 3404 - RNA, 19 nt, Artificial Sequence
  Description of Artificial Sequence: Synthetic oligonucleotide
aacauuuccuauauaacaa

SEQ ID NO: 3405 - RNA, 19 nt, Artificial Sequence
  Description of Artificial Sequence: Synthetic oligonucleotide
acauuuccuauauaacaau

SEQ ID NO: 3406 - RNA, 19 nt, Artificial Sequence
  Description of Artificial Sequence: Synthetic oligonucleotide
cauuuccuauauaacaauu

SEQ ID NO: 3407 - RNA, 19 nt, Artificial Sequence
  Description of Artificial Sequence: Synthetic oligonucleotide
auuuccuauauaacaauua

SEQ ID NO: 3408 - RNA, 19 nt, Artificial Sequence
  Description of Artificial Sequence: Synthetic oligonucleotide
uuuccuauauaacaauuau

SEQ ID NO: 3409 - RNA, 19 nt, Artificial Sequence
  Description of Artificial Sequence: Synthetic oligonucleotide
uuccuauauaacaauuauu

SEQ ID NO: 3410 - RNA, 19 nt, Artificial Sequence
  Description of Artificial Sequence: Synthetic oligonucleotide
uccuauauaacaauuauua

SEQ ID NO: 3411 - RNA, 19 nt, Artificial Sequence
  Description of Artificial Sequence: Synthetic oligonucleotide
ccuauauaacaauuauuau

SEQ ID NO: 3412 - RNA, 19 nt, Artificial Sequence
  Description of Artificial Sequence: Synthetic oligonucleotide
cuauauaacaauuauuaua

SEQ ID NO: 3413 - RNA, 19 nt, Artificial Sequence
  Description of Artificial Sequence: Synthetic oligonucleotide
uauauaacaauuauuauau

SEQ ID NO: 3414 - RNA, 19 nt, Artificial Sequence
  Description of Artificial Sequence: Synthetic oligonucleotide
auauaacaauuauuauauu

SEQ ID NO: 3415 - RNA, 19 nt, Artificial Sequence
  Description of Artificial Sequence: Synthetic oligonucleotide
uauaacaauuauuauauuu

SEQ ID NO: 3416 - RNA, 19 nt, Artificial Sequence
  Description of Artificial Sequence: Synthetic oligonucleotide
auaacaauuauuauauuua

SEQ ID NO: 3417 - RNA, 19 nt, Artificial Sequence
  Description of Artificial Sequence: Synthetic oligonucleotide
uaacaauuauuauauuuac

SEQ ID NO: 3418 - RNA, 19 nt, Artificial Sequence
  Description of Artificial Sequence: Synthetic oligonucleotide
aacaauuauuauauuuaca

SEQ ID NO: 3419 - RNA, 19 nt, Artificial Sequence
  Description of Artificial Sequence: Synthetic oligonucleotide
acaauuauuauauuuacaa

SEQ ID NO: 3420 - RNA, 19 nt, Artificial Sequence
  Description of Artificial Sequence: Synthetic oligonucleotide
caauuauuauauuuacaau

SEQ ID NO: 3421 - RNA, 19 nt, Artificial Sequence
  Description of Artificial Sequence: Synthetic oligonucleotide
aauuauuauauuuacaauu

SEQ ID NO: 3422 - RNA, 19 nt, Artificial Sequence
  Description of Artificial Sequence: Synthetic oligonucleotide
auuauuauauuuacaauuu

SEQ ID NO: 3423 - RNA, 19 nt, Artificial Sequence
  Description of Artificial Sequence: Synthetic oligonucleotide
uuauuauauuuacaauuug

SEQ ID NO: 3424 - RNA, 19 nt, Artificial Sequence
  Description of Artificial Sequence: Synthetic oligonucleotide
uauuauauuuacaauuugg

SEQ ID NO: 3425 - RNA, 19 nt, Artificial Sequence
  Description of Artificial Sequence: Synthetic oligonucleotide
auuauauuuacaauuuggu

SEQ ID NO: 3426 - RNA, 19 nt, Artificial Sequence
  Description of Artificial Sequence: Synthetic oligonucleotide
uuauauuuacaauuugguu

SEQ ID NO: 3427 - RNA, 19 nt, Artificial Sequence
  Description of Artificial Sequence: Synthetic oligonucleotide
uauauuuacaauuugguuu

SEQ ID NO: 3428 - RNA, 19 nt, Artificial Sequence
  Description of Artificial Sequence: Synthetic oligonucleotide
auauuuacaauuugguuuc

SEQ ID NO: 3429 - RNA, 19 nt, Artificial Sequence
  Description of Artificial Sequence: Synthetic oligonucleotide
uauuuacaauuugguuucu

SEQ ID NO: 3430 - RNA, 19 nt, Artificial Sequence
  Description of Artificial Sequence: Synthetic oligonucleotide
auuuacaauuugguuucug

SEQ ID NO: 3431 - RNA, 19 nt, Artificial Sequence
  Description of Artificial Sequence: Synthetic oligonucleotide
uuuacaauuugguuucugc

SEQ ID NO: 3432 - RNA, 19 nt, Artificial Sequence
  Description of Artificial Sequence: Synthetic oligonucleotide
uuacaauuugguuucugca

SEQ ID NO: 3433 - RNA, 19 nt, Artificial Sequence
  Description of Artificial Sequence: Synthetic oligonucleotide
uacaauuugguuucugcaa

SEQ ID NO: 3434 - RNA, 19 nt, Artificial Sequence
  Description of Artificial Sequence: Synthetic oligonucleotide
acaauuugguuucugcaau

SEQ ID NO: 3435 - RNA, 19 nt, Artificial Sequence
  Description of Artificial Sequence: Synthetic oligonucleotide
caauuugguuucugcaaua

SEQ ID NO: 3436 - RNA, 19 nt, Artificial Sequence
  Description of Artificial Sequence: Synthetic oligonucleotide
aauuugguuucugcaauau

SEQ ID NO: 3437 - RNA, 19 nt, Artificial Sequence
  Description of Artificial Sequence: Synthetic oligonucleotide
auuugguuucugcaauauu

SEQ ID NO: 3438 - RNA, 19 nt, Artificial Sequence
  Description of Artificial Sequence: Synthetic oligonucleotide
uuugguuucugcaauauuu

SEQ ID NO: 3439 - RNA, 19 nt, Artificial Sequence
  Description of Artificial Sequence: Synthetic oligonucleotide
uugguuucugcaauauuuu

SEQ ID NO: 3440 - RNA, 19 nt, Artificial Sequence
  Description of Artificial Sequence: Synthetic oligonucleotide
ugguuucugcaauauuuuu

SEQ ID NO: 3441 - RNA, 19 nt, Artificial Sequence
  Description of Artificial Sequence: Synthetic oligonucleotide
gguuucugcaauauuuuuc

SEQ ID NO: 3442 - RNA, 19 nt, Artificial Sequence
  Description of Artificial Sequence: Synthetic oligonucleotide
guuucugcaauauuuuucu

SEQ ID NO: 3443 - RNA, 19 nt, Artificial Sequence
  Description of Artificial Sequence: Synthetic oligonucleotide
uuucugcaauauuuuucuu

SEQ ID NO: 3444 - RNA, 19 nt, Artificial Sequence
  Description of Artificial Sequence: Synthetic oligonucleotide
uucugcaauauuuuucuua

SEQ ID NO: 3445 - RNA, 19 nt, Artificial Sequence
  Description of Artificial Sequence: Synthetic oligonucleotide
ucugcaauauuuuucuuau

SEQ ID NO: 3446 - RNA, 19 nt, Artificial Sequence
  Description of Artificial Sequence: Synthetic oligonucleotide
cugcaauauuuuucuuaug

SEQ ID NO: 3447 - RNA, 19 nt, Artificial Sequence
  Description of Artificial Sequence: Synthetic oligonucleotide
ugcaauauuuuucuuaugu

SEQ ID NO: 3448 - RNA, 19 nt, Artificial Sequence
  Description of Artificial Sequence: Synthetic oligonucleotide
gcaauauuuuucuuauguc

SEQ ID NO: 3449 - RNA, 19 nt, Artificial Sequence
  Description of Artificial Sequence: Synthetic oligonucleotide
caauauuuuucuuaugucc

SEQ ID NO: 3450 - RNA, 19 nt, Artificial Sequence
  Description of Artificial Sequence: Synthetic oligonucleotide
aauauuuuucuuaugucca

SEQ ID NO: 3451 - RNA, 19 nt, Artificial Sequence
  Description of Artificial Sequence: Synthetic oligonucleotide
auauuuuucuuauguccac

SEQ ID NO: 3452 - RNA, 19 nt, Artificial Sequence
  Description of Artificial Sequence: Synthetic oligonucleotide
uauuuuucuuauguccacc

SEQ ID NO: 3453 - RNA, 19 nt, Artificial Sequence
  Description of Artificial Sequence: Synthetic oligonucleotide
auuuuucuuauguccaccc

SEQ ID NO: 3454 - RNA, 19 nt, Artificial Sequence
  Description of Artificial Sequence: Synthetic oligonucleotide
uuuuucuuauguccacccu

SEQ ID NO: 3455 - RNA, 19 nt, Artificial Sequence
  Description of Artificial Sequence: Synthetic oligonucleotide
uuuucuuauguccacccuu

SEQ ID NO: 3456 - RNA, 19 nt, Artificial Sequence
  Description of Artificial Sequence: Synthetic oligonucleotide
uuucuuauguccacccuuu

SEQ ID NO: 3457 - RNA, 19 nt, Artificial Sequence
  Description of Artificial Sequence: Synthetic oligonucleotide
uucuuauguccacccuuuu

SEQ ID NO: 3458 - RNA, 19 nt, Artificial Sequence
  Description of Artificial Sequence: Synthetic oligonucleotide
ucuuauguccacccuuuua

SEQ ID NO: 3459 - RNA, 19 nt, Artificial Sequence
  Description of Artificial Sequence: Synthetic oligonucleotide
cuuauguccacccuuuuaa

SEQ ID NO: 3460 - RNA, 19 nt, Artificial Sequence
  Description of Artificial Sequence: Synthetic oligonucleotide
uuauguccacccuuuuaaa

SEQ ID NO: 3461 - RNA, 19 nt, Artificial Sequence
  Description of Artificial Sequence: Synthetic oligonucleotide
uauguccacccuuuuaaaa

SEQ ID NO: 3462 - RNA, 19 nt, Artificial Sequence
  Description of Artificial Sequence: Synthetic oligonucleotide
auguccacccuuuuaaaaa

SEQ ID NO: 3463 - RNA, 19 nt, Artificial Sequence
  Description of Artificial Sequence: Synthetic oligonucleotide
uguccacccuuuuaaaaau

SEQ ID NO: 3464 - RNA, 19 nt, Artificial Sequence
  Description of Artificial Sequence: Synthetic oligonucleotide
guccacccuuuuaaaaauu

SEQ ID NO: 3465 - RNA, 19 nt, Artificial Sequence
  Description of Artificial Sequence: Synthetic oligonucleotide
uccacccuuuuaaaaauua

SEQ ID NO: 3466 - RNA, 19 nt, Artificial Sequence
  Description of Artificial Sequence: Synthetic oligonucleotide
ccacccuuuuaaaaauuau

SEQ ID NO: 3467 - RNA, 19 nt, Artificial Sequence
  Description of Artificial Sequence: Synthetic oligonucleotide
cacccuuuuaaaaauuauu

SEQ ID NO: 3468 - RNA, 19 nt, Artificial Sequence
  Description of Artificial Sequence: Synthetic oligonucleotide
acccuuuuaaaaauuauua

SEQ ID NO: 3469 - RNA, 19 nt, Artificial Sequence
  Description of Artificial Sequence: Synthetic oligonucleotide
cccuuuuaaaaauuauuau

SEQ ID NO: 3470 - RNA, 19 nt, Artificial Sequence
  Description of Artificial Sequence: Synthetic oligonucleotide
ccuuuuaaaaauuauuauu

SEQ ID NO: 3471 - RNA, 19 nt, Artificial Sequence
  Description of Artificial Sequence: Synthetic oligonucleotide
cuuuuaaaaauuauuauuu

SEQ ID NO: 3472 - RNA, 19 nt, Artificial Sequence
  Description of Artificial Sequence: Synthetic oligonucleotide
uuuuaaaaauuauuauuug

SEQ ID NO: 3473 - RNA, 19 nt, Artificial Sequence
  Description of Artificial Sequence: Synthetic oligonucleotide
uuuaaaaauuauuauuuga

SEQ ID NO: 3474 - RNA, 19 nt, Artificial Sequence
  Description of Artificial Sequence: Synthetic oligonucleotide
uuaaaaauuauuauuugaa

SEQ ID NO: 3475 - RNA, 19 nt, Artificial Sequence
  Description of Artificial Sequence: Synthetic oligonucleotide
uaaaaauuauuauuugaag

SEQ ID NO: 3476 - RNA, 19 nt, Artificial Sequence
  Description of Artificial Sequence: Synthetic oligonucleotide
aaaaauuauuauuugaagu

SEQ ID NO: 3477 - RNA, 19 nt, Artificial Sequence
  Description of Artificial Sequence: Synthetic oligonucleotide
aaaauuauuauuugaagua

SEQ ID NO: 3478 - RNA, 19 nt, Artificial Sequence
  Description of Artificial Sequence: Synthetic oligonucleotide
aaauuauuauuugaaguaa

SEQ ID NO: 3479 - RNA, 19 nt, Artificial Sequence
  Description of Artificial Sequence: Synthetic oligonucleotide
aauuauuauuugaaguaau

SEQ ID NO: 3480 - RNA, 19 nt, Artificial Sequence
  Description of Artificial Sequence: Synthetic oligonucleotide
auuauuauuugaaguaauu

SEQ ID NO: 3481 - RNA, 19 nt, Artificial Sequence
  Description of Artificial Sequence: Synthetic oligonucleotide
uuauuauuugaaguaauuu

SEQ ID NO: 3482 - RNA, 19 nt, Artificial Sequence
  Description of Artificial Sequence: Synthetic oligonucleotide
uauuauuugaaguaauuua

SEQ ID NO: 3483 - RNA, 19 nt, Artificial Sequence
  Description of Artificial Sequence: Synthetic oligonucleotide
auuauuugaaguaauuuau

SEQ ID NO: 3484 - RNA, 19 nt, Artificial Sequence
  Description of Artificial Sequence: Synthetic oligonucleotide
uuauuugaaguaauuuauu

SEQ ID NO: 3485 - RNA, 19 nt, Artificial Sequence
  Description of Artificial Sequence: Synthetic oligonucleotide
uauuugaaguaauuuauuu

SEQ ID NO: 3486 - RNA, 19 nt, Artificial Sequence
  Description of Artificial Sequence: Synthetic oligonucleotide
auuugaaguaauuuauuua

SEQ ID NO: 3487 - RNA, 19 nt, Artificial Sequence
  Description of Artificial Sequence: Synthetic oligonucleotide
uuugaaguaauuuauuuac

SEQ ID NO: 3488 - RNA, 19 nt, Artificial Sequence
  Description of Artificial Sequence: Synthetic oligonucleotide
uugaaguaauuuauuuaca

SEQ ID NO: 3489 - RNA, 19 nt, Artificial Sequence
  Description of Artificial Sequence: Synthetic oligonucleotide
ugaaguaauuuauuuacag

SEQ ID NO: 3490 - RNA, 19 nt, Artificial Sequence
  Description of Artificial Sequence: Synthetic oligonucleotide
gaaguaauuuauuuacagg

SEQ ID NO: 3491 - RNA, 19 nt, Artificial Sequence
  Description of Artificial Sequence: Synthetic oligonucleotide
aaguaauuuauuuacagga

SEQ ID NO: 3492 - RNA, 19 nt, Artificial Sequence
  Description of Artificial Sequence: Synthetic oligonucleotide
aguaauuuauuuacaggaa

SEQ ID NO: 3493 - RNA, 19 nt, Artificial Sequence
  Description of Artificial Sequence: Synthetic oligonucleotide
guaauuuauuuacaggaaa

SEQ ID NO: 3494 - RNA, 19 nt, Artificial Sequence
  Description of Artificial Sequence: Synthetic oligonucleotide
uaauuuauuuacaggaaau

SEQ ID NO: 3495 - RNA, 19 nt, Artificial Sequence
  Description of Artificial Sequence: Synthetic oligonucleotide
aauuuauuuacaggaaaug

SEQ ID NO: 3496 - RNA, 19 nt, Artificial Sequence
  Description of Artificial Sequence: Synthetic oligonucleotide
auuuauuuacaggaaaugu

SEQ ID NO: 3497 - RNA, 19 nt, Artificial Sequence
  Description of Artificial Sequence: Synthetic oligonucleotide
uuuauuuacaggaaauguu

SEQ ID NO: 3498 - RNA, 19 nt, Artificial Sequence
  Description of Artificial Sequence: Synthetic oligonucleotide
uuauuuacaggaaauguua

SEQ ID NO: 3499 - RNA, 19 nt, Artificial Sequence
  Description of Artificial Sequence: Synthetic oligonucleotide
uauuuacaggaaauguuaa

SEQ ID NO: 3500 - RNA, 19 nt, Artificial Sequence
  Description of Artificial Sequence: Synthetic oligonucleotide
auuuacaggaaauguuaau

SEQ ID NO: 3501 - RNA, 19 nt, Artificial Sequence
  Description of Artificial Sequence: Synthetic oligonucleotide
uuuacaggaaauguuaaug

SEQ ID NO: 3502 - RNA, 19 nt, Artificial Sequence
  Description of Artificial Sequence: Synthetic oligonucleotide
uuacaggaaauguuaauga

SEQ ID NO: 3503 - RNA, 19 nt, Artificial Sequence
  Description of Artificial Sequence: Synthetic oligonucleotide
uacaggaaauguuaaugag

SEQ ID NO: 3504 - RNA, 19 nt, Artificial Sequence
  Description of Artificial Sequence: Synthetic oligonucleotide
acaggaaauguuaaugaga

SEQ ID NO: 3505 - RNA, 19 nt, Artificial Sequence
  Description of Artificial Sequence: Synthetic oligonucleotide
caggaaauguuaaugagau

SEQ ID NO: 3506 - RNA, 19 nt, Artificial Sequence
  Description of Artificial Sequence: Synthetic oligonucleotide
aggaaauguuaaugagaug

SEQ ID NO: 3507 - RNA, 19 nt, Artificial Sequence
  Description of Artificial Sequence: Synthetic oligonucleotide
ggaaauguuaaugagaugu

SEQ ID NO: 3508 - RNA, 19 nt, Artificial Sequence
  Description of Artificial Sequence: Synthetic oligonucleotide
gaaauguuaaugagaugua

SEQ ID NO: 3509 - RNA, 19 nt, Artificial Sequence
  Description of Artificial Sequence: Synthetic oligonucleotide
aaauguuaaugagauguau

SEQ ID NO: 3510 - RNA, 19 nt, Artificial Sequence
  Description of Artificial Sequence: Synthetic oligonucleotide
aauguuaaugagauguauu

SEQ ID NO: 3511 - RNA, 19 nt, Artificial Sequence
  Description of Artificial Sequence: Synthetic oligonucleotide
auguuaaugagauguauuu

SEQ ID NO: 3512 - RNA, 19 nt, Artificial Sequence
  Description of Artificial Sequence: Synthetic oligonucleotide
uguuaaugagauguauuuu

SEQ ID NO: 3513 - RNA, 19 nt, Artificial Sequence
  Description of Artificial Sequence: Synthetic oligonucleotide
guuaaugagauguauuuuc

SEQ ID NO: 3514 - RNA, 19 nt, Artificial Sequence
  Description of Artificial Sequence: Synthetic oligonucleotide
uuaaugagauguauuuucu

SEQ ID NO: 3515 - RNA, 19 nt, Artificial Sequence
  Description of Artificial Sequence: Synthetic oligonucleotide
uaaugagauguauuuucuu

SEQ ID NO: 3516 - RNA, 19 nt, Artificial Sequence
  Description of Artificial Sequence: Synthetic oligonucleotide
aaugagauguauuuucuua

SEQ ID NO: 3517 - RNA, 19 nt, Artificial Sequence
  Description of Artificial Sequence: Synthetic oligonucleotide
augagauguauuuucuuau

SEQ ID NO: 3518 - RNA, 19 nt, Artificial Sequence
  Description of Artificial Sequence: Synthetic oligonucleotide
ugagauguauuuucuuaua

SEQ ID NO: 3519 - RNA, 19 nt, Artificial Sequence
  Description of Artificial Sequence: Synthetic oligonucleotide
gagauguauuuucuuauag

SEQ ID NO: 3520 - RNA, 19 nt, Artificial Sequence
  Description of Artificial Sequence: Synthetic oligonucleotide
agauguauuuucuuauaga

SEQ ID NO: 3521 - RNA, 19 nt, Artificial Sequence
  Description of Artificial Sequence: Synthetic oligonucleotide
gauguauuuucuuauagag

SEQ ID NO: 3522 - RNA, 19 nt, Artificial Sequence
  Description of Artificial Sequence: Synthetic oligonucleotide
auguauuuucuuauagaga

SEQ ID NO: 3523 - RNA, 19 nt, Artificial Sequence
  Description of Artificial Sequence: Synthetic oligonucleotide
uguauuuucuuauagagau

SEQ ID NO: 3524 - RNA, 19 nt, Artificial Sequence
  Description of Artificial Sequence: Synthetic oligonucleotide
guauuuucuuauagagaua

SEQ ID NO: 3525 - RNA, 19 nt, Artificial Sequence
  Description of Artificial Sequence: Synthetic oligonucleotide
uauuuucuuauagagauau

SEQ ID NO: 3526 - RNA, 19 nt, Artificial Sequence
  Description of Artificial Sequence: Synthetic oligonucleotide
auuuucuuauagagauauu

SEQ ID NO: 3527 - RNA, 19 nt, Artificial Sequence
  Description of Artificial Sequence: Synthetic oligonucleotide
uuuucuuauagagauauuu

SEQ ID NO: 3528 - RNA, 19 nt, Artificial Sequence
  Description of Artificial Sequence: Synthetic oligonucleotide
uuucuuauagagauauuuc

SEQ ID NO: 3529 - RNA, 19 nt, Artificial Sequence
  Description of Artificial Sequence: Synthetic oligonucleotide
uucuuauagagauauuucu

SEQ ID NO: 3530 - RNA, 19 nt, Artificial Sequence
  Description of Artificial Sequence: Synthetic oligonucleotide
ucuuauagagauauuucuu

SEQ ID NO: 3531 - RNA, 19 nt, Artificial Sequence
  Description of Artificial Sequence: Synthetic oligonucleotide
cuuauagagauauuucuua

SEQ ID NO: 3532 - RNA, 19 nt, Artificial Sequence
  Description of Artificial Sequence: Synthetic oligonucleotide
uuauagagauauuucuuac

SEQ ID NO: 3533 - RNA, 19 nt, Artificial Sequence
  Description of Artificial Sequence: Synthetic oligonucleotide
uauagagauauuucuuaca

SEQ ID NO: 3534 - RNA, 19 nt, Artificial Sequence
  Description of Artificial Sequence: Synthetic oligonucleotide
auagagauauuucuuacag

SEQ ID NO: 3535 - RNA, 19 nt, Artificial Sequence
  Description of Artificial Sequence: Synthetic oligonucleotide
uagagauauuucuuacaga

SEQ ID NO: 3536 - RNA, 19 nt, Artificial Sequence
  Description of Artificial Sequence: Synthetic oligonucleotide
agagauauuucuuacagaa

SEQ ID NO: 3537 - RNA, 19 nt, Artificial Sequence
  Description of Artificial Sequence: Synthetic oligonucleotide
gagauauuucuuacagaaa

SEQ ID NO: 3538 - RNA, 19 nt, Artificial Sequence
  Description of Artificial Sequence: Synthetic oligonucleotide
agauauuucuuacagaaag

SEQ ID NO: 3539 - RNA, 19 nt, Artificial Sequence
  Description of Artificial Sequence: Synthetic oligonucleotide
gauauuucuuacagaaagc

SEQ ID NO: 3540 - RNA, 19 nt, Artificial Sequence
  Description of Artificial Sequence: Synthetic oligonucleotide
auauuucuuacagaaagcu

SEQ ID NO: 3541 - RNA, 19 nt, Artificial Sequence
  Description of Artificial Sequence: Synthetic oligonucleotide
uauuucuuacagaaagcuu

SEQ ID NO: 3542 - RNA, 19 nt, Artificial Sequence
  Description of Artificial Sequence: Synthetic oligonucleotide
auuucuuacagaaagcuuu

SEQ ID NO: 3543 - RNA, 19 nt, Artificial Sequence
  Description of Artificial Sequence: Synthetic oligonucleotide
uuucuuacagaaagcuuug

SEQ ID NO: 3544 - RNA, 19 nt, Artificial Sequence
  Description of Artificial Sequence: Synthetic oligonucleotide
uucuuacagaaagcuuugu

SEQ ID NO: 3545 - RNA, 19 nt, Artificial Sequence
  Description of Artificial Sequence: Synthetic oligonucleotide
ucuuacagaaagcuuugua

SEQ ID NO: 3546 - RNA, 19 nt, Artificial Sequence
  Description of Artificial Sequence: Synthetic oligonucleotide
cuuacagaaagcuuuguag

SEQ ID NO: 3547 - RNA, 19 nt, Artificial Sequence
  Description of Artificial Sequence: Synthetic oligonucleotide
uuacagaaagcuuuguagc

SEQ ID NO: 3548 - RNA, 19 nt, Artificial Sequence
  Description of Artificial Sequence: Synthetic oligonucleotide
uacagaaagcuuuguagca

SEQ ID NO: 3549 - RNA, 19 nt, Artificial Sequence
  Description of Artificial Sequence: Synthetic oligonucleotide
acagaaagcuuuguagcag

SEQ ID NO: 3550 - RNA, 19 nt, Artificial Sequence
  Description of Artificial Sequence: Synthetic oligonucleotide
cagaaagcuuuguagcaga

SEQ ID NO: 3551 - RNA, 19 nt, Artificial Sequence
  Description of Artificial Sequence: Synthetic oligonucleotide
agaaagcuuuguagcagaa

SEQ ID NO: 3552 - RNA, 19 nt, Artificial Sequence
  Description of Artificial Sequence: Synthetic oligonucleotide
gaaagcuuuguagcagaau

SEQ ID NO: 3553 - RNA, 19 nt, Artificial Sequence
  Description of Artificial Sequence: Synthetic oligonucleotide
aaagcuuuguagcagaaua

SEQ ID NO: 3554 - RNA, 19 nt, Artificial Sequence
  Description of Artificial Sequence: Synthetic oligonucleotide
aagcuuuguagcagaauau

SEQ ID NO: 3555 - RNA, 19 nt, Artificial Sequence
  Description of Artificial Sequence: Synthetic oligonucleotide
agcuuuguagcagaauaua

SEQ ID NO: 3556 - RNA, 19 nt, Artificial Sequence
  Description of Artificial Sequence: Synthetic oligonucleotide
gcuuuguagcagaauauau

SEQ ID NO: 3557 - RNA, 19 nt, Artificial Sequence
  Description of Artificial Sequence: Synthetic oligonucleotide
cuuuguagcagaauauauu

SEQ ID NO: 3558 - RNA, 19 nt, Artificial Sequence
  Description of Artificial Sequence: Synthetic oligonucleotide
uuuguagcagaauauauuu

SEQ ID NO: 3559 - RNA, 19 nt, Artificial Sequence
  Description of Artificial Sequence: Synthetic oligonucleotide
uuguagcagaauauauuug

SEQ ID NO: 3560 - RNA, 19 nt, Artificial Sequence
  Description of Artificial Sequence: Synthetic oligonucleotide
uguagcagaauauauuugc

SEQ ID NO: 3561 - RNA, 19 nt, Artificial Sequence
  Description of Artificial Sequence: Synthetic oligonucleotide
guagcagaauauauuugca

SEQ ID NO: 3562 - RNA, 19 nt, Artificial Sequence
  Description of Artificial Sequence: Synthetic oligonucleotide
uagcagaauauauuugcag

SEQ ID NO: 3563 - RNA, 19 nt, Artificial Sequence
  Description of Artificial Sequence: Synthetic oligonucleotide
agcagaauauauuugcagc

SEQ ID NO: 3564 - RNA, 19 nt, Artificial Sequence
  Description of Artificial Sequence: Synthetic oligonucleotide
gcagaauauauuugcagcu

SEQ ID NO: 3565 - RNA, 19 nt, Artificial Sequence
  Description of Artificial Sequence: Synthetic oligonucleotide
cagaauauauuugcagcua

SEQ ID NO: 3566 - RNA, 19 nt, Artificial Sequence
  Description of Artificial Sequence: Synthetic oligonucleotide
agaauauauuugcagcuau

SEQ ID NO: 3567 - RNA, 19 nt, Artificial Sequence
  Description of Artificial Sequence: Synthetic oligonucleotide
gaauauauuugcagcuauu

SEQ ID NO: 3568 - RNA, 19 nt, Artificial Sequence
  Description of Artificial Sequence: Synthetic oligonucleotide
aauauauuugcagcuauug

SEQ ID NO: 3569 - RNA, 19 nt, Artificial Sequence
  Description of Artificial Sequence: Synthetic oligonucleotide
auauauuugcagcuauuga

SEQ ID NO: 3570 - RNA, 19 nt, Artificial Sequence
  Description of Artificial Sequence: Synthetic oligonucleotide
uauauuugcagcuauugac

SEQ ID NO: 3571 - RNA, 19 nt, Artificial Sequence
  Description of Artificial Sequence: Synthetic oligonucleotide
auauuugcagcuauugacu

SEQ ID NO: 3572 - RNA, 19 nt, Artificial Sequence
  Description of Artificial Sequence: Synthetic oligonucleotide
uauuugcagcuauugacuu

SEQ ID NO: 3573 - RNA, 19 nt, Artificial Sequence
  Description of Artificial Sequence: Synthetic oligonucleotide
auuugcagcuauugacuuu

SEQ ID NO: 3574 - RNA, 19 nt, Artificial Sequence
  Description of Artificial Sequence: Synthetic oligonucleotide
uuugcagcuauugacuuug

SEQ ID NO: 3575 - RNA, 19 nt, Artificial Sequence
  Description of Artificial Sequence: Synthetic oligonucleotide
uugcagcuauugacuuugu

SEQ ID NO: 3576 - RNA, 19 nt, Artificial Sequence
  Description of Artificial Sequence: Synthetic oligonucleotide
ugcagcuauugacuuugua

SEQ ID NO: 3577 - RNA, 19 nt, Artificial Sequence
  Description of Artificial Sequence: Synthetic oligonucleotide
gcagcuauugacuuuguaa

SEQ ID NO: 3578 - RNA, 19 nt, Artificial Sequence
  Description of Artificial Sequence: Synthetic oligonucleotide
cagcuauugacuuuguaau

SEQ ID NO: 3579 - RNA, 19 nt, Artificial Sequence
  Description of Artificial Sequence: Synthetic oligonucleotide
agcuauugacuuuguaauu

SEQ ID NO: 3580 - RNA, 19 nt, Artificial Sequence
  Description of Artificial Sequence: Synthetic oligonucleotide
gcuauugacuuuguaauuu

SEQ ID NO: 3581 - RNA, 19 nt, Artificial Sequence
  Description of Artificial Sequence: Synthetic oligonucleotide
cuauugacuuuguaauuua

SEQ ID NO: 3582 - RNA, 19 nt, Artificial Sequence
  Description of Artificial Sequence: Synthetic oligonucleotide
uauugacuuuguaauuuag

SEQ ID NO: 3583 - RNA, 19 nt, Artificial Sequence
  Description of Artificial Sequence: Synthetic oligonucleotide
auugacuuuguaauuuagg

SEQ ID NO: 3584 - RNA, 19 nt, Artificial Sequence
  Description of Artificial Sequence: Synthetic oligonucleotide
uugacuuuguaauuuagga

SEQ ID NO: 3585 - RNA, 19 nt, Artificial Sequence
  Description of Artificial Sequence: Synthetic oligonucleotide
ugacuuuguaauuuaggaa

SEQ ID NO: 3586 - RNA, 19 nt, Artificial Sequence
  Description of Artificial Sequence: Synthetic oligonucleotide
gacuuuguaauuuaggaaa

SEQ ID NO: 3587 - RNA, 19 nt, Artificial Sequence
  Description of Artificial Sequence: Synthetic oligonucleotide
acuuuguaauuuaggaaaa

SEQ ID NO: 3588 - RNA, 19 nt, Artificial Sequence
  Description of Artificial Sequence: Synthetic oligonucleotide
cuuuguaauuuaggaaaaa

SEQ ID NO: 3589 - RNA, 19 nt, Artificial Sequence
  Description of Artificial Sequence: Synthetic oligonucleotide
uuuguaauuuaggaaaaau

SEQ ID NO: 3590 - RNA, 19 nt, Artificial Sequence
  Description of Artificial Sequence: Synthetic oligonucleotide
uuguaauuuaggaaaaaug

SEQ ID NO: 3591 - RNA, 19 nt, Artificial Sequence
  Description of Artificial Sequence: Synthetic oligonucleotide
uguaauuuaggaaaaaugu

SEQ ID NO: 3592 - RNA, 19 nt, Artificial Sequence
  Description of Artificial Sequence: Synthetic oligonucleotide
guaauuuaggaaaaaugua

SEQ ID NO: 3593 - RNA, 19 nt, Artificial Sequence
  Description of Artificial Sequence: Synthetic oligonucleotide
uaauuuaggaaaaauguau

SEQ ID NO: 3594 - RNA, 19 nt, Artificial Sequence
  Description of Artificial Sequence: Synthetic oligonucleotide
aauuuaggaaaaauguaua

SEQ ID NO: 3595 - RNA, 19 nt, Artificial Sequence
  Description of Artificial Sequence: Synthetic oligonucleotide
auuuaggaaaaauguauaa

SEQ ID NO: 3596 - RNA, 19 nt, Artificial Sequence
  Description of Artificial Sequence: Synthetic oligonucleotide
uuuaggaaaaauguauaau

SEQ ID NO: 3597 - RNA, 19 nt, Artificial Sequence
  Description of Artificial Sequence: Synthetic oligonucleotide
uuaggaaaaauguauaaua

SEQ ID NO: 3598 - RNA, 19 nt, Artificial Sequence
  Description of Artificial Sequence: Synthetic oligonucleotide
uaggaaaaauguauaauaa

SEQ ID NO: 3599 - RNA, 19 nt, Artificial Sequence
  Description of Artificial Sequence: Synthetic oligonucleotide
aggaaaaauguauaauaag

SEQ ID NO: 3600 - RNA, 19 nt, Artificial Sequence
  Description of Artificial Sequence: Synthetic oligonucleotide
ggaaaaauguauaauaaga

SEQ ID NO: 3601 - RNA, 19 nt, Artificial Sequence
  Description of Artificial Sequence: Synthetic oligonucleotide
gaaaaauguauaauaagau

SEQ ID NO: 3602 - RNA, 19 nt, Artificial Sequence
  Description of Artificial Sequence: Synthetic oligonucleotide
aaaaauguauaauaagaua

SEQ ID NO: 3603 - RNA, 19 nt, Artificial Sequence
  Description of Artificial Sequence: Synthetic oligonucleotide
aaaauguauaauaagauaa

SEQ ID NO: 3604 - RNA, 19 nt, Artificial Sequence
  Description of Artificial Sequence: Synthetic oligonucleotide
aaauguauaauaagauaaa

SEQ ID NO: 3605 - RNA, 19 nt, Artificial Sequence
  Description of Artificial Sequence: Synthetic oligonucleotide
aauguauaauaagauaaaa

SEQ ID NO: 3606 - RNA, 19 nt, Artificial Sequence
  Description of Artificial Sequence: Synthetic oligonucleotide
auguauaauaagauaaaau

SEQ ID NO: 3607 - RNA, 19 nt, Artificial Sequence
  Description of Artificial Sequence: Synthetic oligonucleotide
uguauaauaagauaaaauc

SEQ ID NO: 3608 - RNA, 19 nt, Artificial Sequence
  Description of Artificial Sequence: Synthetic oligonucleotide
guauaauaagauaaaaucu

SEQ ID NO: 3609 - RNA, 19 nt, Artificial Sequence
  Description of Artificial Sequence: Synthetic oligonucleotide
uauaauaagauaaaaucua

SEQ ID NO: 3610 - RNA, 19 nt, Artificial Sequence
  Description of Artificial Sequence: Synthetic oligonucleotide
auaauaagauaaaaucuau

SEQ ID NO: 3611 - RNA, 19 nt, Artificial Sequence
  Description of Artificial Sequence: Synthetic oligonucleotide
uaauaagauaaaaucuauu

SEQ ID NO: 3612 - RNA, 19 nt, Artificial Sequence
  Description of Artificial Sequence: Synthetic oligonucleotide
aauaagauaaaaucuauua

SEQ ID NO: 3613 - RNA, 19 nt, Artificial Sequence
  Description of Artificial Sequence: Synthetic oligonucleotide
auaagauaaaaucuauuaa

SEQ ID NO: 3614 - RNA, 19 nt, Artificial Sequence
  Description of Artificial Sequence: Synthetic oligonucleotide
uaagauaaaaucuauuaaa

SEQ ID NO: 3615 - RNA, 19 nt, Artificial Sequence
  Description of Artificial Sequence: Synthetic oligonucleotide
aagauaaaaucuauuaaau

SEQ ID NO: 3616 - RNA, 19 nt, Artificial Sequence
  Description of Artificial Sequence: Synthetic oligonucleotide
agauaaaaucuauuaaauu

SEQ ID NO: 3617 - RNA, 19 nt, Artificial Sequence
  Description of Artificial Sequence: Synthetic oligonucleotide
gauaaaaucuauuaaauuu

SEQ ID NO: 3618 - RNA, 19 nt, Artificial Sequence
  Description of Artificial Sequence: Synthetic oligonucleotide
auaaaaucuauuaaauuuu

SEQ ID NO: 3619 - RNA, 19 nt, Artificial Sequence
  Description of Artificial Sequence: Synthetic oligonucleotide
uaaaaucuauuaaauuuuu

SEQ ID NO: 3620 - RNA, 19 nt, Artificial Sequence
  Description of Artificial Sequence: Synthetic oligonucleotide
aaaaucuauuaaauuuuuc

SEQ ID NO: 3621 - RNA, 19 nt, Artificial Sequence
  Description of Artificial Sequence: Synthetic oligonucleotide
aaaucuauuaaauuuuucu

SEQ ID NO: 3622 - RNA, 19 nt, Artificial Sequence
  Description of Artificial Sequence: Synthetic oligonucleotide
aaucuauuaaauuuuucuc

SEQ ID NO: 3623 - RNA, 19 nt, Artificial Sequence
  Description of Artificial Sequence: Synthetic oligonucleotide
aucuauuaaauuuuucucc

SEQ ID NO: 3624 - RNA, 19 nt, Artificial Sequence
  Description of Artificial Sequence: Synthetic oligonucleotide
ucuauuaaauuuuucuccu

SEQ ID NO: 3625 - RNA, 19 nt, Artificial Sequence
  Description of Artificial Sequence: Synthetic oligonucleotide
cuauuaaauuuuucuccuc

SEQ ID NO: 3626 - RNA, 19 nt, Artificial Sequence
  Description of Artificial Sequence: Synthetic oligonucleotide
uauuaaauuuuucuccucu

SEQ ID NO: 3627 - RNA, 19 nt, Artificial Sequence
  Description of Artificial Sequence: Synthetic oligonucleotide
auuaaauuuuucuccucua

SEQ ID NO: 3628 - RNA, 19 nt, Artificial Sequence
  Description of Artificial Sequence: Synthetic oligonucleotide
uuaaauuuuucuccucuaa

SEQ ID NO: 3629 - RNA, 19 nt, Artificial Sequence
  Description of Artificial Sequence: Synthetic oligonucleotide
uaaauuuuucuccucuaaa

SEQ ID NO: 3630 - RNA, 19 nt, Artificial Sequence
  Description of Artificial Sequence: Synthetic oligonucleotide
aaauuuuucuccucuaaaa

SEQ ID NO: 3631 - RNA, 19 nt, Artificial Sequence
  Description of Artificial Sequence: Synthetic oligonucleotide
aauuuuucuccucuaaaaa

SEQ ID NO: 3632 - RNA, 19 nt, Artificial Sequence
  Description of Artificial Sequence: Synthetic oligonucleotide
auuuuucuccucuaaaaac

SEQ ID NO: 3633 - RNA, 19 nt, Artificial Sequence
  Description of Artificial Sequence: Synthetic oligonucleotide
uuuuucuccucuaaaaacu

SEQ ID NO: 3634 - RNA, 19 nt, Artificial Sequence
  Description of Artificial Sequence: Synthetic oligonucleotide
uuuucuccucuaaaaacug

SEQ ID NO: 3635 - RNA, 19 nt, Artificial Sequence
  Description of Artificial Sequence: Synthetic oligonucleotide
uuucuccucuaaaaacuga

SEQ ID NO: 3636 - RNA, 19 nt, Artificial Sequence
  Description of Artificial Sequence: Synthetic oligonucleotide
uucuccucuaaaaacugaa

SEQ ID NO: 3637 - RNA, 19 nt, Artificial Sequence
  Description of Artificial Sequence: Synthetic oligonucleotide
cgcuuucucucucucugcu

SEQ ID NO: 3638 - RNA, 19 nt, Artificial Sequence
  Description of Artificial Sequence: Synthetic oligonucleotide
ccgcuuucucucucucugc

SEQ ID NO: 3639 - RNA, 19 nt, Artificial Sequence
  Description of Artificial Sequence: Synthetic oligonucleotide
cccgcuuucucucucucug

SEQ ID NO: 3640 - RNA, 19 nt, Artificial Sequence
  Description of Artificial Sequence: Synthetic oligonucleotide
ucccgcuuucucucucucu

SEQ ID NO: 3641 - RNA, 19 nt, Artificial Sequence
  Description of Artificial Sequence: Synthetic oligonucleotide
cucccgcuuucucucucuc

SEQ ID NO: 3642 - RNA, 19 nt, Artificial Sequence
  Description of Artificial Sequence: Synthetic oligonucleotide
gcucccgcuuucucucucu

SEQ ID NO: 3643 - RNA, 19 nt, Artificial Sequence
  Description of Artificial Sequence: Synthetic oligonucleotide
ggcucccgcuuucucucuc

SEQ ID NO: 3644 - RNA, 19 nt, Artificial Sequence
  Description of Artificial Sequence: Synthetic oligonucleotide
gggcucccgcuuucucucu

SEQ ID NO: 3645 - RNA, 19 nt, Artificial Sequence
  Description of Artificial Sequence: Synthetic oligonucleotide
cgggcucccgcuuucucuc

SEQ ID NO: 3646 - RNA, 19 nt, Artificial Sequence
  Description of Artificial Sequence: Synthetic oligonucleotide
gcgggcucccgcuuucucu

SEQ ID NO: 3647 - RNA, 19 nt, Artificial Sequence
  Description of Artificial Sequence: Synthetic oligonucleotide
cgcgggcucccgcuuucuc

SEQ ID NO: 3648 - RNA, 19 nt, Artificial Sequence
  Description of Artificial Sequence: Synthetic oligonucleotide
ccgcgggcucccgcuuucu

SEQ ID NO: 3649 - RNA, 19 nt, Artificial Sequence
  Description of Artificial Sequence: Synthetic oligonucleotide
gccgcgggcucccgcuuuc

SEQ ID NO: 3650 - RNA, 19 nt, Artificial Sequence
  Description of Artificial Sequence: Synthetic oligonucleotide
cgccgcgggcucccgcuuu

SEQ ID NO: 3651 - RNA, 19 nt, Artificial Sequence
  Description of Artificial Sequence: Synthetic oligonucleotide
ucgccgcgggcucccgcuu

SEQ ID NO: 3652 - RNA, 19 nt, Artificial Sequence
  Description of Artificial Sequence: Synthetic oligonucleotide
cucgccgcgggcucccgcu

SEQ ID NO: 3653 - RNA, 19 nt, Artificial Sequence
  Description of Artificial Sequence: Synthetic oligonucleotide
gcucgccgcgggcucccgc

SEQ ID NO: 3654 - RNA, 19 nt, Artificial Sequence
  Description of Artificial Sequence: Synthetic oligonucleotide
cgcucgccgcgggcucccg

SEQ ID NO: 3655 - RNA, 19 nt, Artificial Sequence
  Description of Artificial Sequence: Synthetic oligonucleotide
acgcucgccgcgggcuccc

SEQ ID NO: 3656 - RNA, 19 nt, Artificial Sequence
  Description of Artificial Sequence: Synthetic oligonucleotide
uacgcucgccgcgggcucc

SEQ ID NO: 3657 - RNA, 19 nt, Artificial Sequence
  Description of Artificial Sequence: Synthetic oligonucleotide
cuacgcucgccgcgggcuc

SEQ ID NO: 3658 - RNA, 19 nt, Artificial Sequence
  Description of Artificial Sequence: Synthetic oligonucleotide
gcuacgcucgccgcgggcu

SEQ ID NO: 3659 - RNA, 19 nt, Artificial Sequence
  Description of Artificial Sequence: Synthetic oligonucleotide
cgcuacgcucgccgcgggc

SEQ ID NO: 3660 - RNA, 19 nt, Artificial Sequence
  Description of Artificial Sequence: Synthetic oligonucleotide
gcgcuacgcucgccgcggg

SEQ ID NO: 3661 - RNA, 19 nt, Artificial Sequence
  Description of Artificial Sequence: Synthetic oligonucleotide
ugcgcuacgcucgccgcgg

SEQ ID NO: 3662 - RNA, 19 nt, Artificial Sequence
  Description of Artificial Sequence: Synthetic oligonucleotide
uugcgcuacgcucgccgcg

SEQ ID NO: 3663 - RNA, 19 nt, Artificial Sequence
  Description of Artificial Sequence: Synthetic oligonucleotide
cuugcgcuacgcucgccgc

SEQ ID NO: 3664 - RNA, 19 nt, Artificial Sequence
  Description of Artificial Sequence: Synthetic oligonucleotide
acuugcgcuacgcucgccg

SEQ ID NO: 3665 - RNA, 19 nt, Artificial Sequence
  Description of Artificial Sequence: Synthetic oligonucleotide
gacuugcgcuacgcucgcc

SEQ ID NO: 3666 - RNA, 19 nt, Artificial Sequence
  Description of Artificial Sequence: Synthetic oligonucleotide
ggacuugcgcuacgcucgc

SEQ ID NO: 3667 - RNA, 19 nt, Artificial Sequence
  Description of Artificial Sequence: Synthetic oligonucleotide
cggacuugcgcuacgcucg

SEQ ID NO: 3668 - RNA, 19 nt, Artificial Sequence
  Description of Artificial Sequence: Synthetic oligonucleotide
gcggacuugcgcuacgcuc

SEQ ID NO: 3669 - RNA, 19 nt, Artificial Sequence
  Description of Artificial Sequence: Synthetic oligonucleotide
agcggacuugcgcuacgcu

SEQ ID NO: 3670 - RNA, 19 nt, Artificial Sequence
  Description of Artificial Sequence: Synthetic oligonucleotide
gagcggacuugcgcuacgc

SEQ ID NO: 3671 - RNA, 19 nt, Artificial Sequence
  Description of Artificial Sequence: Synthetic oligonucleotide
ggagcggacuugcgcuacg

SEQ ID NO: 3672 - RNA, 19 nt, Artificial Sequence
  Description of Artificial Sequence: Synthetic oligonucleotide
gggagcggacuugcgcuac

SEQ ID NO: 3673 - RNA, 19 nt, Artificial Sequence
  Description of Artificial Sequence: Synthetic oligonucleotide
agggagcggacuugcgcua

SEQ ID NO: 3674 - RNA, 19 nt, Artificial Sequence
  Description of Artificial Sequence: Synthetic oligonucleotide
uagggagcggacuugcgcu

SEQ ID NO: 3675 - RNA, 19 nt, Artificial Sequence
  Description of Artificial Sequence: Synthetic oligonucleotide
cuagggagcggacuugcgc

SEQ ID NO: 3676 - RNA, 19 nt, Artificial Sequence
  Description of Artificial Sequence: Synthetic oligonucleotide
ccuagggagcggacuugcg

SEQ ID NO: 3677 - RNA, 19 nt, Artificial Sequence
  Description of Artificial Sequence: Synthetic oligonucleotide
gccuagggagcggacuugc

SEQ ID NO: 3678 - RNA, 19 nt, Artificial Sequence
  Description of Artificial Sequence: Synthetic oligonucleotide
ugccuagggagcggacuug

SEQ ID NO: 3679 - RNA, 19 nt, Artificial Sequence
  Description of Artificial Sequence: Synthetic oligonucleotide
augccuagggagcggacuu

SEQ ID NO: 3680 - RNA, 19 nt, Artificial Sequence
  Description of Artificial Sequence: Synthetic oligonucleotide
gaugccuagggagcggacu

SEQ ID NO: 3681 - RNA, 19 nt, Artificial Sequence
  Description of Artificial Sequence: Synthetic oligonucleotide
cgaugccuagggagcggac

SEQ ID NO: 3682 - RNA, 19 nt, Artificial Sequence
  Description of Artificial Sequence: Synthetic oligonucleotide
gcgaugccuagggagcgga

SEQ ID NO: 3683 - RNA, 19 nt, Artificial Sequence
  Description of Artificial Sequence: Synthetic oligonucleotide
agcgaugccuagggagcgg

SEQ ID NO: 3684 - RNA, 19 nt, Artificial Sequence
  Description of Artificial Sequence: Synthetic oligonucleotide
cagcgaugccuagggagcg

SEQ ID NO: 3685 - RNA, 19 nt, Artificial Sequence
  Description of Artificial Sequence: Synthetic oligonucleotide
gcagcgaugccuagggagc

SEQ ID NO: 3686 - RNA, 19 nt, Artificial Sequence
  Description of Artificial Sequence: Synthetic oligonucleotide
cgcagcgaugccuagggag

SEQ ID NO: 3687 - RNA, 19 nt, Artificial Sequence
  Description of Artificial Sequence: Synthetic oligonucleotide
gcgcagcgaugccuaggga

SEQ ID NO: 3688 - RNA, 19 nt, Artificial Sequence
  Description of Artificial Sequence: Synthetic oligonucleotide
agcgcagcgaugccuaggg

SEQ ID NO: 3689 - RNA, 19 nt, Artificial Sequence
  Description of Artificial Sequence: Synthetic oligonucleotide
cagcgcagcgaugccuagg

SEQ ID NO: 3690 - RNA, 19 nt, Artificial Sequence
  Description of Artificial Sequence: Synthetic oligonucleotide
ccagcgcagcgaugccuag

SEQ ID NO: 3691 - RNA, 19 nt, Artificial Sequence
  Description of Artificial Sequence: Synthetic oligonucleotide
gccagcgcagcgaugccua

SEQ ID NO: 3692 - RNA, 19 nt, Artificial Sequence
  Description of Artificial Sequence: Synthetic oligonucleotide
ugccagcgcagcgaugccu

SEQ ID NO: 3693 - RNA, 19 nt, Artificial Sequence
  Description of Artificial Sequence: Synthetic oligonucleotide
cugccagcgcagcgaugcc

SEQ ID NO: 3694 - RNA, 19 nt, Artificial Sequence
  Description of Artificial Sequence: Synthetic oligonucleotide
gcugccagcgcagcgaugc

SEQ ID NO: 3695 - RNA, 19 nt, Artificial Sequence
  Description of Artificial Sequence: Synthetic oligonucleotide
cgcugccagcgcagcgaug

SEQ ID NO: 3696 - RNA, 19 nt, Artificial Sequence
  Description of Artificial Sequence: Synthetic oligonucleotide
ucgcugccagcgcagcgau

SEQ ID NO: 3697 - RNA, 19 nt, Artificial Sequence
  Description of Artificial Sequence: Synthetic oligonucleotide
aucgcugccagcgcagcga

SEQ ID NO: 3698 - RNA, 19 nt, Artificial Sequence
  Description of Artificial Sequence: Synthetic oligonucleotide
aaucgcugccagcgcagcg

SEQ ID NO: 3699 - RNA, 19 nt, Artificial Sequence
  Description of Artificial Sequence: Synthetic oligonucleotide
gaaucgcugccagcgcagc

SEQ ID NO: 3700 - RNA, 19 nt, Artificial Sequence
  Description of Artificial Sequence: Synthetic oligonucleotide
cgaaucgcugccagcgcag

SEQ ID NO: 3701 - RNA, 19 nt, Artificial Sequence
  Description of Artificial Sequence: Synthetic oligonucleotide
gcgaaucgcugccagcgca

SEQ ID NO: 3702 - RNA, 19 nt, Artificial Sequence
  Description of Artificial Sequence: Synthetic oligonucleotide
agcgaaucgcugccagcgc

SEQ ID NO: 3703 - RNA, 19 nt, Artificial Sequence
  Description of Artificial Sequence: Synthetic oligonucleotide
cagcgaaucgcugccagcg

SEQ ID NO: 3704 - RNA, 19 nt, Artificial Sequence
  Description of Artificial Sequence: Synthetic oligonucleotide
acagcgaaucgcugccagc

SEQ ID NO: 3705 - RNA, 19 nt, Artificial Sequence
  Description of Artificial Sequence: Synthetic oligonucleotide
gacagcgaaucgcugccag

SEQ ID NO: 3706 - RNA, 19 nt, Artificial Sequence
  Description of Artificial Sequence: Synthetic oligonucleotide
agacagcgaaucgcugcca

SEQ ID NO: 3707 - RNA, 19 nt, Artificial Sequence
  Description of Artificial Sequence: Synthetic oligonucleotide
gagacagcgaaucgcugcc

SEQ ID NO: 3708 - RNA, 19 nt, Artificial Sequence
  Description of Artificial Sequence: Synthetic oligonucleotide
agagacagcgaaucgcugc

SEQ ID NO: 3709 - RNA, 19 nt, Artificial Sequence
  Description of Artificial Sequence: Synthetic oligonucleotide
aagagacagcgaaucgcug

SEQ ID NO: 3710 - RNA, 19 nt, Artificial Sequence
  Description of Artificial Sequence: Synthetic oligonucleotide
caagagacagcgaaucgcu

SEQ ID NO: 3711 - RNA, 19 nt, Artificial Sequence
  Description of Artificial Sequence: Synthetic oligonucleotide
acaagagacagcgaaucgc

SEQ ID NO: 3712 - RNA, 19 nt, Artificial Sequence
  Description of Artificial Sequence: Synthetic oligonucleotide
cacaagagacagcgaaucg

SEQ ID NO: 3713 - RNA, 19 nt, Artificial Sequence
  Description of Artificial Sequence: Synthetic oligonucleotide
ucacaagagacagcgaauc

SEQ ID NO: 3714 - RNA, 19 nt, Artificial Sequence
  Description of Artificial Sequence: Synthetic oligonucleotide
cucacaagagacagcgaau

SEQ ID NO: 3715 - RNA, 19 nt, Artificial Sequence
  Description of Artificial Sequence: Synthetic oligonucleotide
acucacaagagacagcgaa

SEQ ID NO: 3716 - RNA, 19 nt, Artificial Sequence
  Description of Artificial Sequence: Synthetic oligonucleotide
gacucacaagagacagcga

SEQ ID NO: 3717 - RNA, 19 nt, Artificial Sequence
  Description of Artificial Sequence: Synthetic oligonucleotide
ugacucacaagagacagcg

SEQ ID NO: 3718 - RNA, 19 nt, Artificial Sequence
  Description of Artificial Sequence: Synthetic oligonucleotide
cugacucacaagagacagc

SEQ ID NO: 3719 - RNA, 19 nt, Artificial Sequence
  Description of Artificial Sequence: Synthetic oligonucleotide
ccugacucacaagagacag

SEQ ID NO: 3720 - RNA, 19 nt, Artificial Sequence
  Description of Artificial Sequence: Synthetic oligonucleotide
cccugacucacaagagaca

SEQ ID NO: 3721 - RNA, 19 nt, Artificial Sequence
  Description of Artificial Sequence: Synthetic oligonucleotide
ccccugacucacaagagac

SEQ ID NO: 3722 - RNA, 19 nt, Artificial Sequence
  Description of Artificial Sequence: Synthetic oligonucleotide
uccccugacucacaagaga

SEQ ID NO: 3723 - RNA, 19 nt, Artificial Sequence
  Description of Artificial Sequence: Synthetic oligonucleotide
guccccugacucacaagag

SEQ ID NO: 3724 - RNA, 19 nt, Artificial Sequence
  Description of Artificial Sequence: Synthetic oligonucleotide
uguccccugacucacaaga

SEQ ID NO: 3725 - RNA, 19 nt, Artificial Sequence
  Description of Artificial Sequence: Synthetic oligonucleotide
uuguccccugacucacaag

SEQ ID NO: 3726 - RNA, 19 nt, Artificial Sequence
  Description of Artificial Sequence: Synthetic oligonucleotide
guuguccccugacucacaa

SEQ ID NO: 3727 - RNA, 19 nt, Artificial Sequence
  Description of Artificial Sequence: Synthetic oligonucleotide
cguuguccccugacucaca

SEQ ID NO: 3728 - RNA, 19 nt, Artificial Sequence
  Description of Artificial Sequence: Synthetic oligonucleotide
gcguuguccccugacucac

SEQ ID NO: 3729 - RNA, 19 nt, Artificial Sequence
  Description of Artificial Sequence: Synthetic oligonucleotide
agcguuguccccugacuca

SEQ ID NO: 3730 - RNA, 19 nt, Artificial Sequence
  Description of Artificial Sequence: Synthetic oligonucleotide
aagcguuguccccugacuc

SEQ ID NO: 3731 - RNA, 19 nt, Artificial Sequence
  Description of Artificial Sequence: Synthetic oligonucleotide
gaagcguuguccccugacu

SEQ ID NO: 3732 - RNA, 19 nt, Artificial Sequence
  Description of Artificial Sequence: Synthetic oligonucleotide
cgaagcguuguccccugac

SEQ ID NO: 3733 - RNA, 19 nt, Artificial Sequence
  Description of Artificial Sequence: Synthetic oligonucleotide
ccgaagcguuguccccuga

SEQ ID NO: 3734 - RNA, 19 nt, Artificial Sequence
  Description of Artificial Sequence: Synthetic oligonucleotide
cccgaagcguuguccccug

SEQ ID NO: 3735 - RNA, 19 nt, Artificial Sequence
  Description of Artificial Sequence: Synthetic oligonucleotide
ccccgaagcguuguccccu

SEQ ID NO: 3736 - RNA, 19 nt, Artificial Sequence
  Description of Artificial Sequence: Synthetic oligonucleotide
gccccgaagcguugucccc

SEQ ID NO: 3737 - RNA, 19 nt, Artificial Sequence
  Description of Artificial Sequence: Synthetic oligonucleotide
ugccccgaagcguuguccc

SEQ ID NO: 3738 - RNA, 19 nt, Artificial Sequence
  Description of Artificial Sequence: Synthetic oligonucleotide
uugccccgaagcguugucc

SEQ ID NO: 3739 - RNA, 19 nt, Artificial Sequence
  Description of Artificial Sequence: Synthetic oligonucleotide
guugccccgaagcguuguc

SEQ ID NO: 3740 - RNA, 19 nt, Artificial Sequence
  Description of Artificial Sequence: Synthetic oligonucleotide
aguugccccgaagcguugu

SEQ ID NO: 3741 - RNA, 19 nt, Artificial Sequence
  Description of Artificial Sequence: Synthetic oligonucleotide
caguugccccgaagcguug

SEQ ID NO: 3742 - RNA, 19 nt, Artificial Sequence
  Description of Artificial Sequence: Synthetic oligonucleotide
acaguugccccgaagcguu

SEQ ID NO: 3743 - RNA, 19 nt, Artificial Sequence
  Description of Artificial Sequence: Synthetic oligonucleotide
cacaguugccccgaagcgu

SEQ ID NO: 3744 - RNA, 19 nt, Artificial Sequence
  Description of Artificial Sequence: Synthetic oligonucleotide
ucacaguugccccgaagcg

SEQ ID NO: 3745 - RNA, 19 nt, Artificial Sequence
  Description of Artificial Sequence: Synthetic oligonucleotide
cucacaguugccccgaagc

SEQ ID NO: 3746 - RNA, 19 nt, Artificial Sequence
  Description of Artificial Sequence: Synthetic oligonucleotide
acucacaguugccccgaag

SEQ ID NO: 3747 - RNA, 19 nt, Artificial Sequence
  Description of Artificial Sequence: Synthetic oligonucleotide
cacucacaguugccccgaa

SEQ ID NO: 3748 - RNA, 19 nt, Artificial Sequence
  Description of Artificial Sequence: Synthetic oligonucleotide
gcacucacaguugccccga

SEQ ID NO: 3749 - RNA, 19 nt, Artificial Sequence
  Description of Artificial Sequence: Synthetic oligonucleotide
cgcacucacaguugccccg

SEQ ID NO: 3750 - RNA, 19 nt, Artificial Sequence
  Description of Artificial Sequence: Synthetic oligonucleotide
gcgcacucacaguugcccc

SEQ ID NO: 3751 - RNA, 19 nt, Artificial Sequence
  Description of Artificial Sequence: Synthetic oligonucleotide
cgcgcacucacaguugccc

SEQ ID NO: 3752 - RNA, 19 nt, Artificial Sequence
  Description of Artificial Sequence: Synthetic oligonucleotide
acgcgcacucacaguugcc

SEQ ID NO: 3753 - RNA, 19 nt, Artificial Sequence
  Description of Artificial Sequence: Synthetic oligonucleotide
cacgcgcacucacaguugc

SEQ ID NO: 3754 - RNA, 19 nt, Artificial Sequence
  Description of Artificial Sequence: Synthetic oligonucleotide
acacgcgcacucacaguug

SEQ ID NO: 3755 - RNA, 19 nt, Artificial Sequence
  Description of Artificial Sequence: Synthetic oligonucleotide
cacacgcgcacucacaguu

SEQ ID NO: 3756 - RNA, 19 nt, Artificial Sequence
  Description of Artificial Sequence: Synthetic oligonucleotide
ccacacgcgcacucacagu

SEQ ID NO: 3757 - RNA, 19 nt, Artificial Sequence
  Description of Artificial Sequence: Synthetic oligonucleotide
cccacacgcgcacucacag

SEQ ID NO: 3758 - RNA, 19 nt, Artificial Sequence
  Description of Artificial Sequence: Synthetic oligonucleotide
ccccacacgcgcacucaca

SEQ ID NO: 3759 - RNA, 19 nt, Artificial Sequence
  Description of Artificial Sequence: Synthetic oligonucleotide
cccccacacgcgcacucac

SEQ ID NO: 3760 - RNA, 19 nt, Artificial Sequence
  Description of Artificial Sequence: Synthetic oligonucleotide
ucccccacacgcgcacuca

SEQ ID NO: 3761 - RNA, 19 nt, Artificial Sequence
  Description of Artificial Sequence: Synthetic oligonucleotide
gucccccacacgcgcacuc

SEQ ID NO: 3762 - RNA, 19 nt, Artificial Sequence
  Description of Artificial Sequence: Synthetic oligonucleotide
ggucccccacacgcgcacu

SEQ ID NO: 3763 - RNA, 19 nt, Artificial Sequence
  Description of Artificial Sequence: Synthetic oligonucleotide
aggucccccacacgcgcac

SEQ ID NO: 3764 - RNA, 19 nt, Artificial Sequence
  Description of Artificial Sequence: Synthetic oligonucleotide
gaggucccccacacgcgca

SEQ ID NO: 3765 - RNA, 19 nt, Artificial Sequence
  Description of Artificial Sequence: Synthetic oligonucleotide
cgaggucccccacacgcgc

SEQ ID NO: 3766 - RNA, 19 nt, Artificial Sequence
  Description of Artificial Sequence: Synthetic oligonucleotide
ucgaggucccccacacgcg

SEQ ID NO: 3767 - RNA, 19 nt, Artificial Sequence
  Description of Artificial Sequence: Synthetic oligonucleotide
aucgaggucccccacacgc

SEQ ID NO: 3768 - RNA, 19 nt, Artificial Sequence
  Description of Artificial Sequence: Synthetic oligonucleotide
aaucgaggucccccacacg

SEQ ID NO: 3769 - RNA, 19 nt, Artificial Sequence
  Description of Artificial Sequence: Synthetic oligonucleotide
gaaucgaggucccccacac

SEQ ID NO: 3770 - RNA, 19 nt, Artificial Sequence
  Description of Artificial Sequence: Synthetic oligonucleotide
agaaucgaggucccccaca

SEQ ID NO: 3771 - RNA, 19 nt, Artificial Sequence
  Description of Artificial Sequence: Synthetic oligonucleotide
gagaaucgaggucccccac

SEQ ID NO: 3772 - RNA, 19 nt, Artificial Sequence
  Description of Artificial Sequence: Synthetic oligonucleotide
agagaaucgagguccccca

SEQ ID NO: 3773 - RNA, 19 nt, Artificial Sequence
  Description of Artificial Sequence: Synthetic oligonucleotide
aagagaaucgagguccccc

SEQ ID NO: 3774 - RNA, 19 nt, Artificial Sequence
  Description of Artificial Sequence: Synthetic oligonucleotide
gaagagaaucgaggucccc

SEQ ID NO: 3775 - RNA, 19 nt, Artificial Sequence
  Description of Artificial Sequence: Synthetic oligonucleotide
ugaagagaaucgagguccc

SEQ ID NO: 3776 - RNA, 19 nt, Artificial Sequence
  Description of Artificial Sequence: Synthetic oligonucleotide
cugaagagaaucgaggucc

SEQ ID NO: 3777 - RNA, 19 nt, Artificial Sequence
  Description of Artificial Sequence: Synthetic oligonucleotide
ucugaagagaaucgagguc

SEQ ID NO: 3778 - RNA, 19 nt, Artificial Sequence
  Description of Artificial Sequence: Synthetic oligonucleotide
aucugaagagaaucgaggu

SEQ ID NO: 3779 - RNA, 19 nt, Artificial Sequence
  Description of Artificial Sequence: Synthetic oligonucleotide
gaucugaagagaaucgagg

SEQ ID NO: 3780 - RNA, 19 nt, Artificial Sequence
  Description of Artificial Sequence: Synthetic oligonucleotide
agaucugaagagaaucgag

SEQ ID NO: 3781 - RNA, 19 nt, Artificial Sequence
  Description of Artificial Sequence: Synthetic oligonucleotide
gagaucugaagagaaucga

SEQ ID NO: 3782 - RNA, 19 nt, Artificial Sequence
  Description of Artificial Sequence: Synthetic oligonucleotide
cgagaucugaagagaaucg

SEQ ID NO: 3783 - RNA, 19 nt, Artificial Sequence
  Description of Artificial Sequence: Synthetic oligonucleotide
ucgagaucugaagagaauc

SEQ ID NO: 3784 - RNA, 19 nt, Artificial Sequence
  Description of Artificial Sequence: Synthetic oligonucleotide
cucgagaucugaagagaau

SEQ ID NO: 3785 - RNA, 19 nt, Artificial Sequence
  Description of Artificial Sequence: Synthetic oligonucleotide
ccucgagaucugaagagaa

SEQ ID NO: 3786 - RNA, 19 nt, Artificial Sequence
  Description of Artificial Sequence: Synthetic oligonucleotide
uccucgagaucugaagaga

SEQ ID NO: 3787 - RNA, 19 nt, Artificial Sequence
  Description of Artificial Sequence: Synthetic oligonucleotide
auccucgagaucugaagag

SEQ ID NO: 3788 - RNA, 19 nt, Artificial Sequence
  Description of Artificial Sequence: Synthetic oligonucleotide
aauccucgagaucugaaga

SEQ ID NO: 3789 - RNA, 19 nt, Artificial Sequence
  Description of Artificial Sequence: Synthetic oligonucleotide
gaauccucgagaucugaag

SEQ ID NO: 3790 - RNA, 19 nt, Artificial Sequence
  Description of Artificial Sequence: Synthetic oligonucleotide
cgaauccucgagaucugaa

SEQ ID NO: 3791 - RNA, 19 nt, Artificial Sequence
  Description of Artificial Sequence: Synthetic oligonucleotide
ccgaauccucgagaucuga

SEQ ID NO: 3792 - RNA, 19 nt, Artificial Sequence
  Description of Artificial Sequence: Synthetic oligonucleotide
accgaauccucgagaucug

SEQ ID NO: 3793 - RNA, 19 nt, Artificial Sequence
  Description of Artificial Sequence: Synthetic oligonucleotide
gaccgaauccucgagaucu

SEQ ID NO: 3794 - RNA, 19 nt, Artificial Sequence
  Description of Artificial Sequence: Synthetic oligonucleotide
ggaccgaauccucgagauc

SEQ ID NO: 3795 - RNA, 19 nt, Artificial Sequence
  Description of Artificial Sequence: Synthetic oligonucleotide
cggaccgaauccucgagau

SEQ ID NO: 3796 - RNA, 19 nt, Artificial Sequence
  Description of Artificial Sequence: Synthetic oligonucleotide
ccggaccgaauccucgaga

SEQ ID NO: 3797 - RNA, 19 nt, Artificial Sequence
  Description of Artificial Sequence: Synthetic oligonucleotide
cccggaccgaauccucgag

SEQ ID NO: 3798 - RNA, 19 nt, Artificial Sequence
  Description of Artificial Sequence: Synthetic oligonucleotide
ccccggaccgaauccucga

SEQ ID NO: 3799 - RNA, 19 nt, Artificial Sequence
  Description of Artificial Sequence: Synthetic oligonucleotide
uccccggaccgaauccucg

SEQ ID NO: 3800 - RNA, 19 nt, Artificial Sequence
  Description of Artificial Sequence: Synthetic oligonucleotide
guccccggaccgaauccuc

SEQ ID NO: 3801 - RNA, 19 nt, Artificial Sequence
  Description of Artificial Sequence: Synthetic oligonucleotide
cguccccggaccgaauccu

SEQ ID NO: 3802 - RNA, 19 nt, Artificial Sequence
  Description of Artificial Sequence: Synthetic oligonucleotide
acguccccggaccgaaucc

SEQ ID NO: 3803 - RNA, 19 nt, Artificial Sequence
  Description of Artificial Sequence: Synthetic oligonucleotide
gacguccccggaccgaauc

SEQ ID NO: 3804 - RNA, 19 nt, Artificial Sequence
  Description of Artificial Sequence: Synthetic oligonucleotide
agacguccccggaccgaau

SEQ ID NO: 3805 - RNA, 19 nt, Artificial Sequence
  Description of Artificial Sequence: Synthetic oligonucleotide
gagacguccccggaccgaa

SEQ ID NO: 3806 - RNA, 19 nt, Artificial Sequence
  Description of Artificial Sequence: Synthetic oligonucleotide
ggagacguccccggaccga

SEQ ID NO: 3807 - RNA, 19 nt, Artificial Sequence
  Description of Artificial Sequence: Synthetic oligonucleotide
aggagacguccccggaccg

SEQ ID NO: 3808 - RNA, 19 nt, Artificial Sequence
  Description of Artificial Sequence: Synthetic oligonucleotide
caggagacguccccggacc

SEQ ID NO: 3809 - RNA, 19 nt, Artificial Sequence
  Description of Artificial Sequence: Synthetic oligonucleotide
ucaggagacguccccggac

SEQ ID NO: 3810 - RNA, 19 nt, Artificial Sequence
  Description of Artificial Sequence: Synthetic oligonucleotide
aucaggagacguccccgga

SEQ ID NO: 3811 - RNA, 19 nt, Artificial Sequence
  Description of Artificial Sequence: Synthetic oligonucleotide
gaucaggagacguccccgg

SEQ ID NO: 3812 - RNA, 19 nt, Artificial Sequence
  Description of Artificial Sequence: Synthetic oligonucleotide
ggaucaggagacguccccg

SEQ ID NO: 3813 - RNA, 19 nt, Artificial Sequence
  Description of Artificial Sequence: Synthetic oligonucleotide
gggaucaggagacgucccc

SEQ ID NO: 3814 - RNA, 19 nt, Artificial Sequence
  Description of Artificial Sequence: Synthetic oligonucleotide
ggggaucaggagacguccc

SEQ ID NO: 3815 - RNA, 19 nt, Artificial Sequence
  Description of Artificial Sequence: Synthetic oligonucleotide
aggggaucaggagacgucc

SEQ ID NO: 3816 - RNA, 19 nt, Artificial Sequence
  Description of Artificial Sequence: Synthetic oligonucleotide
uaggggaucaggagacguc

SEQ ID NO: 3817 - RNA, 19 nt, Artificial Sequence
  Description of Artificial Sequence: Synthetic oligonucleotide
guaggggaucaggagacgu

SEQ ID NO: 3818 - RNA, 19 nt, Artificial Sequence
  Description of Artificial Sequence: Synthetic oligonucleotide
aguaggggaucaggagacg

SEQ ID NO: 3819 - RNA, 19 nt, Artificial Sequence
  Description of Artificial Sequence: Synthetic oligonucleotide
uaguaggggaucaggagac

SEQ ID NO: 3820 - RNA, 19 nt, Artificial Sequence
  Description of Artificial Sequence: Synthetic oligonucleotide
uuaguaggggaucaggaga

SEQ ID NO: 3821 - RNA, 19 nt, Artificial Sequence
  Description of Artificial Sequence: Synthetic oligonucleotide
uuuaguaggggaucaggag

SEQ ID NO: 3822 - RNA, 19 nt, Artificial Sequence
  Description of Artificial Sequence: Synthetic oligonucleotide
cuuuaguaggggaucagga

SEQ ID NO: 3823 - RNA, 19 nt, Artificial Sequence
  Description of Artificial Sequence: Synthetic oligonucleotide
gcuuuaguaggggaucagg

SEQ ID NO: 3824 - RNA, 19 nt, Artificial Sequence
  Description of Artificial Sequence: Synthetic oligonucleotide
cgcuuuaguaggggaucag

SEQ ID NO: 3825 - RNA, 19 nt, Artificial Sequence
  Description of Artificial Sequence: Synthetic oligonucleotide
gcgcuuuaguaggggauca

SEQ ID NO: 3826 - RNA, 19 nt, Artificial Sequence
  Description of Artificial Sequence: Synthetic oligonucleotide
ggcgcuuuaguaggggauc

SEQ ID NO: 3827 - RNA, 19 nt, Artificial Sequence
  Description of Artificial Sequence: Synthetic oligonucleotide
aggcgcuuuaguaggggau

SEQ ID NO: 3828 - RNA, 19 nt, Artificial Sequence
  Description of Artificial Sequence: Synthetic oligonucleotide
caggcgcuuuaguagggga

SEQ ID NO: 3829 - RNA, 19 nt, Artificial Sequence
  Description of Artificial Sequence: Synthetic oligonucleotide
gcaggcgcuuuaguagggg

SEQ ID NO: 3830 - RNA, 19 nt, Artificial Sequence
  Description of Artificial Sequence: Synthetic oligonucleotide
agcaggcgcuuuaguaggg

SEQ ID NO: 3831 - RNA, 19 nt, Artificial Sequence
  Description of Artificial Sequence: Synthetic oligonucleotide
uagcaggcgcuuuaguagg

SEQ ID NO: 3832 - RNA, 19 nt, Artificial Sequence
  Description of Artificial Sequence: Synthetic oligonucleotide
uuagcaggcgcuuuaguag

SEQ ID NO: 3833 - RNA, 19 nt, Artificial Sequence
  Description of Artificial Sequence: Synthetic oligonucleotide
guuagcaggcgcuuuagua

SEQ ID NO: 3834 - RNA, 19 nt, Artificial Sequence
  Description of Artificial Sequence: Synthetic oligonucleotide
aguuagcaggcgcuuuagu

SEQ ID NO: 3835 - RNA, 19 nt, Artificial Sequence
  Description of Artificial Sequence: Synthetic oligonucleotide
aaguuagcaggcgcuuuag

SEQ ID NO: 3836 - RNA, 19 nt, Artificial Sequence
  Description of Artificial Sequence: Synthetic oligonucleotide
aaaguuagcaggcgcuuua

SEQ ID NO: 3837 - RNA, 19 nt, Artificial Sequence
  Description of Artificial Sequence: Synthetic oligonucleotide
caaaguuagcaggcgcuuu

SEQ ID NO: 3838 - RNA, 19 nt, Artificial Sequence
  Description of Artificial Sequence: Synthetic oligonucleotide
ucaaaguuagcaggcgcuu

SEQ ID NO: 3839 - RNA, 19 nt, Artificial Sequence
  Description of Artificial Sequence: Synthetic oligonucleotide
uucaaaguuagcaggcgcu

SEQ ID NO: 3840 - RNA, 19 nt, Artificial Sequence
  Description of Artificial Sequence: Synthetic oligonucleotide
uuucaaaguuagcaggcgc

SEQ ID NO: 3841 - RNA, 19 nt, Artificial Sequence
  Description of Artificial Sequence: Synthetic oligonucleotide
uuuucaaaguuagcaggcg

SEQ ID NO: 3842 - RNA, 19 nt, Artificial Sequence
  Description of Artificial Sequence: Synthetic oligonucleotide
cuuuucaaaguuagcaggc

SEQ ID NO: 3843 - RNA, 19 nt, Artificial Sequence
  Description of Artificial Sequence: Synthetic oligonucleotide
ccuuuucaaaguuagcagg

SEQ ID NO: 3844 - RNA, 19 nt, Artificial Sequence
  Description of Artificial Sequence: Synthetic oligonucleotide
uccuuuucaaaguuagcag

SEQ ID NO: 3845 - RNA, 19 nt, Artificial Sequence
  Description of Artificial Sequence: Synthetic oligonucleotide
cuccuuuucaaaguuagca

SEQ ID NO: 3846 - RNA, 19 nt, Artificial Sequence
  Description of Artificial Sequence: Synthetic oligonucleotide
gcuccuuuucaaaguuagc

SEQ ID NO: 3847 - RNA, 19 nt, Artificial Sequence
  Description of Artificial Sequence: Synthetic oligonucleotide
ugcuccuuuucaaaguuag

SEQ ID NO: 3848 - RNA, 19 nt, Artificial Sequence
  Description of Artificial Sequence: Synthetic oligonucleotide
gugcuccuuuucaaaguua

SEQ ID NO: 3849 - RNA, 19 nt, Artificial Sequence
  Description of Artificial Sequence: Synthetic oligonucleotide
agugcuccuuuucaaaguu

SEQ ID NO: 3850 - RNA, 19 nt, Artificial Sequence
  Description of Artificial Sequence: Synthetic oligonucleotide
cagugcuccuuuucaaagu

SEQ ID NO: 3851 - RNA, 19 nt, Artificial Sequence
  Description of Artificial Sequence: Synthetic oligonucleotide
acagugcuccuuuucaaag

SEQ ID NO: 3852 - RNA, 19 nt, Artificial Sequence
  Description of Artificial Sequence: Synthetic oligonucleotide
cacagugcuccuuuucaaa

SEQ ID NO: 3853 - RNA, 19 nt, Artificial Sequence
  Description of Artificial Sequence: Synthetic oligonucleotide
acacagugcuccuuuucaa

SEQ ID NO: 3854 - RNA, 19 nt, Artificial Sequence
  Description of Artificial Sequence: Synthetic oligonucleotide
gacacagugcuccuuuuca

SEQ ID NO: 3855 - RNA, 19 nt, Artificial Sequence
  Description of Artificial Sequence: Synthetic oligonucleotide
ggacacagugcuccuuuuc

SEQ ID NO: 3856 - RNA, 19 nt, Artificial Sequence
  Description of Artificial Sequence: Synthetic oligonucleotide
aggacacagugcuccuuuu

SEQ ID NO: 3857 - RNA, 19 nt, Artificial Sequence
  Description of Artificial Sequence: Synthetic oligonucleotide
caggacacagugcuccuuu

SEQ ID NO: 3858 - RNA, 19 nt, Artificial Sequence
  Description of Artificial Sequence: Synthetic oligonucleotide
gcaggacacagugcuccuu

SEQ ID NO: 3859 - RNA, 19 nt, Artificial Sequence
  Description of Artificial Sequence: Synthetic oligonucleotide
ugcaggacacagugcuccu

SEQ ID NO: 3860 - RNA, 19 nt, Artificial Sequence
  Description of Artificial Sequence: Synthetic oligonucleotide
uugcaggacacagugcucc

SEQ ID NO: 3861 - RNA, 19 nt, Artificial Sequence
  Description of Artificial Sequence: Synthetic oligonucleotide
uuugcaggacacagugcuc

SEQ ID NO: 3862 - RNA, 19 nt, Artificial Sequence
  Description of Artificial Sequence: Synthetic oligonucleotide
cuuugcaggacacagugcu

SEQ ID NO: 3863 - RNA, 19 nt, Artificial Sequence
  Description of Artificial Sequence: Synthetic oligonucleotide
acuuugcaggacacagugc

SEQ ID NO: 3864 - RNA, 19 nt, Artificial Sequence
  Description of Artificial Sequence: Synthetic oligonucleotide
aacuuugcaggacacagug

SEQ ID NO: 3865 - RNA, 19 nt, Artificial Sequence
  Description of Artificial Sequence: Synthetic oligonucleotide
aaacuuugcaggacacagu

SEQ ID NO: 3866 - RNA, 19 nt, Artificial Sequence
  Description of Artificial Sequence: Synthetic oligonucleotide
caaacuuugcaggacacag

SEQ ID NO: 3867 - RNA, 19 nt, Artificial Sequence
  Description of Artificial Sequence: Synthetic oligonucleotide
ucaaacuuugcaggacaca

SEQ ID NO: 3868 - RNA, 19 nt, Artificial Sequence
  Description of Artificial Sequence: Synthetic oligonucleotide
gucaaacuuugcaggacac

SEQ ID NO: 3869 - RNA, 19 nt, Artificial Sequence
  Description of Artificial Sequence: Synthetic oligonucleotide
ugucaaacuuugcaggaca

SEQ ID NO: 3870 - RNA, 19 nt, Artificial Sequence
  Description of Artificial Sequence: Synthetic oligonucleotide
gugucaaacuuugcaggac

SEQ ID NO: 3871 - RNA, 19 nt, Artificial Sequence
  Description of Artificial Sequence: Synthetic oligonucleotide
ugugucaaacuuugcagga

SEQ ID NO: 3872 - RNA, 19 nt, Artificial Sequence
  Description of Artificial Sequence: Synthetic oligonucleotide
augugucaaacuuugcagg

SEQ ID NO: 3873 - RNA, 19 nt, Artificial Sequence
  Description of Artificial Sequence: Synthetic oligonucleotide
uaugugucaaacuuugcag

SEQ ID NO: 3874 - RNA, 19 nt, Artificial Sequence
  Description of Artificial Sequence: Synthetic oligonucleotide
uuaugugucaaacuuugca

SEQ ID NO: 3875 - RNA, 19 nt, Artificial Sequence
  Description of Artificial Sequence: Synthetic oligonucleotide
uuuaugugucaaacuuugc

SEQ ID NO: 3876 - RNA, 19 nt, Artificial Sequence
  Description of Artificial Sequence: Synthetic oligonucleotide
cuuuaugugucaaacuuug

SEQ ID NO: 3877 - RNA, 19 nt, Artificial Sequence
  Description of Artificial Sequence: Synthetic oligonucleotide
ccuuuaugugucaaacuuu

SEQ ID NO: 3878 - RNA, 19 nt, Artificial Sequence
  Description of Artificial Sequence: Synthetic oligonucleotide
uccuuuaugugucaaacuu

SEQ ID NO: 3879 - RNA, 19 nt, Artificial Sequence
  Description of Artificial Sequence: Synthetic oligonucleotide
auccuuuaugugucaaacu

SEQ ID NO: 3880 - RNA, 19 nt, Artificial Sequence
  Description of Artificial Sequence: Synthetic oligonucleotide
uauccuuuaugugucaaac

SEQ ID NO: 3881 - RNA, 19 nt, Artificial Sequence
  Description of Artificial Sequence: Synthetic oligonucleotide
cuauccuuuaugugucaaa

SEQ ID NO: 3882 - RNA, 19 nt, Artificial Sequence
  Description of Artificial Sequence: Synthetic oligonucleotide
ccuauccuuuaugugucaa

SEQ ID NO: 3883 - RNA, 19 nt, Artificial Sequence
  Description of Artificial Sequence: Synthetic oligonucleotide
uccuauccuuuauguguca

SEQ ID NO: 3884 - RNA, 19 nt, Artificial Sequence
  Description of Artificial Sequence: Synthetic oligonucleotide
uuccuauccuuuauguguc

SEQ ID NO: 3885 - RNA, 19 nt, Artificial Sequence
  Description of Artificial Sequence: Synthetic oligonucleotide
uuuccuauccuuuaugugu

SEQ ID NO: 3886 - RNA, 19 nt, Artificial Sequence
  Description of Artificial Sequence: Synthetic oligonucleotide
uuuuccuauccuuuaugug

SEQ ID NO: 3887 - RNA, 19 nt, Artificial Sequence
  Description of Artificial Sequence: Synthetic oligonucleotide
cuuuuccuauccuuuaugu

SEQ ID NO: 3888 - RNA, 19 nt, Artificial Sequence
  Description of Artificial Sequence: Synthetic oligonucleotide
ucuuuuccuauccuuuaug

SEQ ID NO: 3889 - RNA, 19 nt, Artificial Sequence
  Description of Artificial Sequence: Synthetic oligonucleotide
cucuuuuccuauccuuuau

SEQ ID NO: 3890 - RNA, 19 nt, Artificial Sequence
  Description of Artificial Sequence: Synthetic oligonucleotide
ucucuuuuccuauccuuua

SEQ ID NO: 3891 - RNA, 19 nt, Artificial Sequence
  Description of Artificial Sequence: Synthetic oligonucleotide
cucucuuuuccuauccuuu

SEQ ID NO: 3892 - RNA, 19 nt, Artificial Sequence
  Description of Artificial Sequence: Synthetic oligonucleotide
ccucucuuuuccuauccuu

SEQ ID NO: 3893 - RNA, 19 nt, Artificial Sequence
  Description of Artificial Sequence: Synthetic oligonucleotide
uccucucuuuuccuauccu

SEQ ID NO: 3894 - RNA, 19 nt, Artificial Sequence
  Description of Artificial Sequence: Synthetic oligonucleotide
cuccucucuuuuccuaucc

SEQ ID NO: 3895 - RNA, 19 nt, Artificial Sequence
  Description of Artificial Sequence: Synthetic oligonucleotide
ucuccucucuuuuccuauc

SEQ ID NO: 3896 - RNA, 19 nt, Artificial Sequence
  Description of Artificial Sequence: Synthetic oligonucleotide
cucuccucucuuuuccuau

SEQ ID NO: 3897 - RNA, 19 nt, Artificial Sequence
  Description of Artificial Sequence: Synthetic oligonucleotide
ucucuccucucuuuuccua

SEQ ID NO: 3898 - RNA, 19 nt, Artificial Sequence
  Description of Artificial Sequence: Synthetic oligonucleotide
uucucuccucucuuuuccu

SEQ ID NO: 3899 - RNA, 19 nt, Artificial Sequence
  Description of Artificial Sequence: Synthetic oligonucleotide
uuucucuccucucuuuucc

SEQ ID NO: 3900 - RNA, 19 nt, Artificial Sequence
  Description of Artificial Sequence: Synthetic oligonucleotide
uuuucucuccucucuuuuc

SEQ ID NO: 3901 - RNA, 19 nt, Artificial Sequence
  Description of Artificial Sequence: Synthetic oligonucleotide
cuuuucucuccucucuuuu

SEQ ID NO: 3902 - RNA, 19 nt, Artificial Sequence
  Description of Artificial Sequence: Synthetic oligonucleotide
gcuuuucucuccucucuuu

SEQ ID NO: 3903 - RNA, 19 nt, Artificial Sequence
  Description of Artificial Sequence: Synthetic oligonucleotide
ugcuuuucucuccucucuu

SEQ ID NO: 3904 - RNA, 19 nt, Artificial Sequence
  Description of Artificial Sequence: Synthetic oligonucleotide
uugcuuuucucuccucucu

SEQ ID NO: 3905 - RNA, 19 nt, Artificial Sequence
  Description of Artificial Sequence: Synthetic oligonucleotide
guugcuuuucucuccucuc

SEQ ID NO: 3906 - RNA, 19 nt, Artificial Sequence
  Description of Artificial Sequence: Synthetic oligonucleotide
aguugcuuuucucuccucu

SEQ ID NO: 3907 - RNA, 19 nt, Artificial Sequence
  Description of Artificial Sequence: Synthetic oligonucleotide
caguugcuuuucucuccuc

SEQ ID NO: 3908 - RNA, 19 nt, Artificial Sequence
  Description of Artificial Sequence: Synthetic oligonucleotide
ucaguugcuuuucucuccu

SEQ ID NO: 3909 - RNA, 19 nt, Artificial Sequence
  Description of Artificial Sequence: Synthetic oligonucleotide
cucaguugcuuuucucucc

SEQ ID NO: 3910 - RNA, 19 nt, Artificial Sequence
  Description of Artificial Sequence: Synthetic oligonucleotide
acucaguugcuuuucucuc

SEQ ID NO: 3911 - RNA, 19 nt, Artificial Sequence
  Description of Artificial Sequence: Synthetic oligonucleotide
aacucaguugcuuuucucu

SEQ ID NO: 3912 - RNA, 19 nt, Artificial Sequence
  Description of Artificial Sequence: Synthetic oligonucleotide
caacucaguugcuuuucuc

SEQ ID NO: 3913 - RNA, 19 nt, Artificial Sequence
  Description of Artificial Sequence: Synthetic oligonucleotide
ucaacucaguugcuuuucu

SEQ ID NO: 3914 - RNA, 19 nt, Artificial Sequence
  Description of Artificial Sequence: Synthetic oligonucleotide
uucaacucaguugcuuuuc

SEQ ID NO: 3915 - RNA, 19 nt, Artificial Sequence
  Description of Artificial Sequence: Synthetic oligonucleotide
cuucaacucaguugcuuuu

SEQ ID NO: 3916 - RNA, 19 nt, Artificial Sequence
  Description of Artificial Sequence: Synthetic oligonucleotide
ccuucaacucaguugcuuu

SEQ ID NO: 3917 - RNA, 19 nt, Artificial Sequence
  Description of Artificial Sequence: Synthetic oligonucleotide
uccuucaacucaguugcuu

SEQ ID NO: 3918 - RNA, 19 nt, Artificial Sequence
  Description of Artificial Sequence: Synthetic oligonucleotide
cuccuucaacucaguugcu

SEQ ID NO: 3919 - RNA, 19 nt, Artificial Sequence
  Description of Artificial Sequence: Synthetic oligonucleotide
ucuccuucaacucaguugc

SEQ ID NO: 3920 - RNA, 19 nt, Artificial Sequence
  Description of Artificial Sequence: Synthetic oligonucleotide
uucuccuucaacucaguug

SEQ ID NO: 3921 - RNA, 19 nt, Artificial Sequence
  Description of Artificial Sequence: Synthetic oligonucleotide
cuucuccuucaacucaguu

SEQ ID NO: 3922 - RNA, 19 nt, Artificial Sequence
  Description of Artificial Sequence: Synthetic oligonucleotide
ccuucuccuucaacucagu

SEQ ID NO: 3923 - RNA, 19 nt, Artificial Sequence
  Description of Artificial Sequence: Synthetic oligonucleotide
uccuucuccuucaacucag

SEQ ID NO: 3924 - RNA, 19 nt, Artificial Sequence
  Description of Artificial Sequence: Synthetic oligonucleotide
cuccuucuccuucaacuca

SEQ ID NO: 3925 - RNA, 19 nt, Artificial Sequence
  Description of Artificial Sequence: Synthetic oligonucleotide
gcuccuucuccuucaacuc

SEQ ID NO: 3926 - RNA, 19 nt, Artificial Sequence
  Description of Artificial Sequence: Synthetic oligonucleotide
agcuccuucuccuucaacu

SEQ ID NO: 3927 - RNA, 19 nt, Artificial Sequence
  Description of Artificial Sequence: Synthetic oligonucleotide
cagcuccuucuccuucaac

SEQ ID NO: 3928 - RNA, 19 nt, Artificial Sequence
  Description of Artificial Sequence: Synthetic oligonucleotide
ucagcuccuucuccuucaa

SEQ ID NO: 3929 - RNA, 19 nt, Artificial Sequence
  Description of Artificial Sequence: Synthetic oligonucleotide
aucagcuccuucuccuuca

SEQ ID NO: 3930 - RNA, 19 nt, Artificial Sequence
  Description of Artificial Sequence: Synthetic oligonucleotide
caucagcuccuucuccuuc

SEQ ID NO: 3931 - RNA, 19 nt, Artificial Sequence
  Description of Artificial Sequence: Synthetic oligonucleotide
gcaucagcuccuucuccuu

SEQ ID NO: 3932 - RNA, 19 nt, Artificial Sequence
  Description of Artificial Sequence: Synthetic oligonucleotide
cgcaucagcuccuucuccu

SEQ ID NO: 3933 - RNA, 19 nt, Artificial Sequence
  Description of Artificial Sequence: Synthetic oligonucleotide
ccgcaucagcuccuucucc

SEQ ID NO: 3934 - RNA, 19 nt, Artificial Sequence
  Description of Artificial Sequence: Synthetic oligonucleotide
cccgcaucagcuccuucuc

SEQ ID NO: 3935 - RNA, 19 nt, Artificial Sequence
  Description of Artificial Sequence: Synthetic oligonucleotide
gcccgcaucagcuccuucu

SEQ ID NO: 3936 - RNA, 19 nt, Artificial Sequence
  Description of Artificial Sequence: Synthetic oligonucleotide
ggcccgcaucagcuccuuc

SEQ ID NO: 3937 - RNA, 19 nt, Artificial Sequence
  Description of Artificial Sequence: Synthetic oligonucleotide
aggcccgcaucagcuccuu

SEQ ID NO: 3938 - RNA, 19 nt, Artificial Sequence
  Description of Artificial Sequence: Synthetic oligonucleotide
gaggcccgcaucagcuccu

SEQ ID NO: 3939 - RNA, 19 nt, Artificial Sequence
  Description of Artificial Sequence: Synthetic oligonucleotide
ggaggcccgcaucagcucc

SEQ ID NO: 3940 - RNA, 19 nt, Artificial Sequence
  Description of Artificial Sequence: Synthetic oligonucleotide
aggaggcccgcaucagcuc

SEQ ID NO: 3941 - RNA, 19 nt, Artificial Sequence
  Description of Artificial Sequence: Synthetic oligonucleotide
caggaggcccgcaucagcu

SEQ ID NO: 3942 - RNA, 19 nt, Artificial Sequence
  Description of Artificial Sequence: Synthetic oligonucleotide
ucaggaggcccgcaucagc

SEQ ID NO: 3943 - RNA, 19 nt, Artificial Sequence
  Description of Artificial Sequence: Synthetic oligonucleotide
aucaggaggcccgcaucag

SEQ ID NO: 3944 - RNA, 19 nt, Artificial Sequence
  Description of Artificial Sequence: Synthetic oligonucleotide
gaucaggaggcccgcauca

SEQ ID NO: 3945 - RNA, 19 nt, Artificial Sequence
  Description of Artificial Sequence: Synthetic oligonucleotide
ugaucaggaggcccgcauc

SEQ ID NO: 3946 - RNA, 19 nt, Artificial Sequence
  Description of Artificial Sequence: Synthetic oligonucleotide
uugaucaggaggcccgcau

SEQ ID NO: 3947 - RNA, 19 nt, Artificial Sequence
  Description of Artificial Sequence: Synthetic oligonucleotide
auugaucaggaggcccgca

SEQ ID NO: 3948 - RNA, 19 nt, Artificial Sequence
  Description of Artificial Sequence: Synthetic oligonucleotide
aauugaucaggaggcccgc

SEQ ID NO: 3949 - RNA, 19 nt, Artificial Sequence
  Description of Artificial Sequence: Synthetic oligonucleotide
uaauugaucaggaggcccg

SEQ ID NO: 3950 - RNA, 19 nt, Artificial Sequence
  Description of Artificial Sequence: Synthetic oligonucleotide
uuaauugaucaggaggccc

SEQ ID NO: 3951 - RNA, 19 nt, Artificial Sequence
  Description of Artificial Sequence: Synthetic oligonucleotide
cuuaauugaucaggaggcc

SEQ ID NO: 3952 - RNA, 19 nt, Artificial Sequence
  Description of Artificial Sequence: Synthetic oligonucleotide
ucuuaauugaucaggaggc

SEQ ID NO: 3953 - RNA, 19 nt, Artificial Sequence
  Description of Artificial Sequence: Synthetic oligonucleotide
cucuuaauugaucaggagg

SEQ ID NO: 3954 - RNA, 19 nt, Artificial Sequence
  Description of Artificial Sequence: Synthetic oligonucleotide
ccucuuaauugaucaggag

SEQ ID NO: 3955 - RNA, 19 nt, Artificial Sequence
  Description of Artificial Sequence: Synthetic oligonucleotide
uccucuuaauugaucagga

SEQ ID NO: 3956 - RNA, 19 nt, Artificial Sequence
  Description of Artificial Sequence: Synthetic oligonucleotide
cuccucuuaauugaucagg

SEQ ID NO: 3957 - RNA, 19 nt, Artificial Sequence
  Description of Artificial Sequence: Synthetic oligonucleotide
ucuccucuuaauugaucag

SEQ ID NO: 3958 - RNA, 19 nt, Artificial Sequence
  Description of Artificial Sequence: Synthetic oligonucleotide
cucuccucuuaauugauca

SEQ ID NO: 3959 - RNA, 19 nt, Artificial Sequence
  Description of Artificial Sequence: Synthetic oligonucleotide
acucuccucuuaauugauc

SEQ ID NO: 3960 - RNA, 19 nt, Artificial Sequence
  Description of Artificial Sequence: Synthetic oligonucleotide
aacucuccucuuaauugau

SEQ ID NO: 3961 - RNA, 19 nt, Artificial Sequence
  Description of Artificial Sequence: Synthetic oligonucleotide
uaacucuccucuuaauuga

SEQ ID NO: 3962 - RNA, 19 nt, Artificial Sequence
  Description of Artificial Sequence: Synthetic oligonucleotide
uuaacucuccucuuaauug

SEQ ID NO: 3963 - RNA, 19 nt, Artificial Sequence
  Description of Artificial Sequence: Synthetic oligonucleotide
uuuaacucuccucuuaauu

SEQ ID NO: 3964 - RNA, 19 nt, Artificial Sequence
  Description of Artificial Sequence: Synthetic oligonucleotide
guuuaacucuccucuuaau

SEQ ID NO: 3965 - RNA, 19 nt, Artificial Sequence
  Description of Artificial Sequence: Synthetic oligonucleotide
gguuuaacucuccucuuaa

SEQ ID NO: 3966 - RNA, 19 nt, Artificial Sequence
  Description of Artificial Sequence: Synthetic oligonucleotide
cgguuuaacucuccucuua

SEQ ID NO: 3967 - RNA, 19 nt, Artificial Sequence
  Description of Artificial Sequence: Synthetic oligonucleotide
gcgguuuaacucuccucuu

SEQ ID NO: 3968 - RNA, 19 nt, Artificial Sequence
  Description of Artificial Sequence: Synthetic oligonucleotide
ggcgguuuaacucuccucu

SEQ ID NO: 3969 - RNA, 19 nt, Artificial Sequence
  Description of Artificial Sequence: Synthetic oligonucleotide
cggcgguuuaacucuccuc

SEQ ID NO: 3970 - RNA, 19 nt, Artificial Sequence
  Description of Artificial Sequence: Synthetic oligonucleotide
ucggcgguuuaacucuccu

SEQ ID NO: 3971 - RNA, 19 nt, Artificial Sequence
  Description of Artificial Sequence: Synthetic oligonucleotide
cucggcgguuuaacucucc

SEQ ID NO: 3972 - RNA, 19 nt, Artificial Sequence
  Description of Artificial Sequence: Synthetic oligonucleotide
ucucggcgguuuaacucuc

SEQ ID NO: 3973 - RNA, 19 nt, Artificial Sequence
  Description of Artificial Sequence: Synthetic oligonucleotide
aucucggcgguuuaacucu

SEQ ID NO: 3974 - RNA, 19 nt, Artificial Sequence
  Description of Artificial Sequence: Synthetic oligonucleotide
gaucucggcgguuuaacuc

SEQ ID NO: 3975 - RNA, 19 nt, Artificial Sequence
  Description of Artificial Sequence: Synthetic oligonucleotide
ggaucucggcgguuuaacu

SEQ ID NO: 3976 - RNA, 19 nt, Artificial Sequence
  Description of Artificial Sequence: Synthetic oligonucleotide
gggaucucggcgguuuaac

SEQ ID NO: 3977 - RNA, 19 nt, Artificial Sequence
  Description of Artificial Sequence: Synthetic oligonucleotide
cgggaucucggcgguuuaa

SEQ ID NO: 3978 - RNA, 19 nt, Artificial Sequence
  Description of Artificial Sequence: Synthetic oligonucleotide
ccgggaucucggcgguuua

SEQ ID NO: 3979 - RNA, 19 nt, Artificial Sequence
  Description of Artificial Sequence: Synthetic oligonucleotide
gccgggaucucggcgguuu

SEQ ID NO: 3980 - RNA, 19 nt, Artificial Sequence
  Description of Artificial Sequence: Synthetic oligonucleotide
cgccgggaucucggcgguu

SEQ ID NO: 3981 - RNA, 19 nt, Artificial Sequence
  Description of Artificial Sequence: Synthetic oligonucleotide
ccgccgggaucucggcggu

SEQ ID NO: 3982 - RNA, 19 nt, Artificial Sequence
  Description of Artificial Sequence: Synthetic oligonucleotide
cccgccgggaucucggcgg

SEQ ID NO: 3983 - RNA, 19 nt, Artificial Sequence
  Description of Artificial Sequence: Synthetic oligonucleotide
ucccgccgggaucucggcg

SEQ ID NO: 3984 - RNA, 19 nt, Artificial Sequence
  Description of Artificial Sequence: Synthetic oligonucleotide
gucccgccgggaucucggc

SEQ ID NO: 3985 - RNA, 19 nt, Artificial Sequence
  Description of Artificial Sequence: Synthetic oligonucleotide
ggucccgccgggaucucgg

SEQ ID NO: 3986 - RNA, 19 nt, Artificial Sequence
  Description of Artificial Sequence: Synthetic oligonucleotide
uggucccgccgggaucucg

SEQ ID NO: 3987 - RNA, 19 nt, Artificial Sequence
  Description of Artificial Sequence: Synthetic oligonucleotide
uuggucccgccgggaucuc

SEQ ID NO: 3988 - RNA, 19 nt, Artificial Sequence
  Description of Artificial Sequence: Synthetic oligonucleotide
cuuggucccgccgggaucu

SEQ ID NO: 3989 - RNA, 19 nt, Artificial Sequence
  Description of Artificial Sequence: Synthetic oligonucleotide
ccuuggucccgccgggauc

SEQ ID NO: 3990 - RNA, 19 nt, Artificial Sequence
  Description of Artificial Sequence: Synthetic oligonucleotide
uccuuggucccgccgggau

SEQ ID NO: 3991 - RNA, 19 nt, Artificial Sequence
  Description of Artificial Sequence: Synthetic oligonucleotide
cuccuuggucccgccggga

SEQ ID NO: 3992 - RNA, 19 nt, Artificial Sequence
  Description of Artificial Sequence: Synthetic oligonucleotide
ccuccuuggucccgccggg

SEQ ID NO: 3993 - RNA, 19 nt, Artificial Sequence
  Description of Artificial Sequence: Synthetic oligonucleotide
accuccuuggucccgccgg

SEQ ID NO: 3994 - RNA, 19 nt, Artificial Sequence
  Description of Artificial Sequence: Synthetic oligonucleotide
caccuccuuggucccgccg

SEQ ID NO: 3995 - RNA, 19 nt, Artificial Sequence
  Description of Artificial Sequence: Synthetic oligonucleotide
gcaccuccuuggucccgcc

SEQ ID NO: 3996 - RNA, 19 nt, Artificial Sequence
  Description of Artificial Sequence: Synthetic oligonucleotide
cgcaccuccuuggucccgc

SEQ ID NO: 3997 - RNA, 19 nt, Artificial Sequence
  Description of Artificial Sequence: Synthetic oligonucleotide
ccgcaccuccuuggucccg

SEQ ID NO: 3998 - RNA, 19 nt, Artificial Sequence
  Description of Artificial Sequence: Synthetic oligonucleotide
cccgcaccuccuugguccc

SEQ ID NO: 3999 - RNA, 19 nt, Artificial Sequence
  Description of Artificial Sequence: Synthetic oligonucleotide
ccccgcaccuccuuggucc

SEQ ID NO: 4000 - RNA, 19 nt, Artificial Sequence
  Description of Artificial Sequence: Synthetic oligonucleotide
gccccgcaccuccuugguc

SEQ ID NO: 4001 - RNA, 19 nt, Artificial Sequence
  Description of Artificial Sequence: Synthetic oligonucleotide
ugccccgcaccuccuuggu

SEQ ID NO: 4002 - RNA, 19 nt, Artificial Sequence
  Description of Artificial Sequence: Synthetic oligonucleotide
uugccccgcaccuccuugg

SEQ ID NO: 4003 - RNA, 19 nt, Artificial Sequence
  Description of Artificial Sequence: Synthetic oligonucleotide
cuugccccgcaccuccuug

SEQ ID NO: 4004 - RNA, 19 nt, Artificial Sequence
  Description of Artificial Sequence: Synthetic oligonucleotide
ucuugccccgcaccuccuu

SEQ ID NO: 4005 - RNA, 19 nt, Artificial Sequence
  Description of Artificial Sequence: Synthetic oligonucleotide
uucuugccccgcaccuccu

SEQ ID NO: 4006 - RNA, 19 nt, Artificial Sequence
  Description of Artificial Sequence: Synthetic oligonucleotide
cuucuugccccgcaccucc

SEQ ID NO: 4007 - RNA, 19 nt, Artificial Sequence
  Description of Artificial Sequence: Synthetic oligonucleotide
ccuucuugccccgcaccuc

SEQ ID NO: 4008 - RNA, 19 nt, Artificial Sequence
  Description of Artificial Sequence: Synthetic oligonucleotide
uccuucuugccccgcaccu

SEQ ID NO: 4009 - RNA, 19 nt, Artificial Sequence
  Description of Artificial Sequence: Synthetic oligonucleotide
uuccuucuugccccgcacc

SEQ ID NO: 4010 - RNA, 19 nt, Artificial Sequence
  Description of Artificial Sequence: Synthetic oligonucleotide
guuccuucuugccccgcac

SEQ ID NO: 4011 - RNA, 19 nt, Artificial Sequence
  Description of Artificial Sequence: Synthetic oligonucleotide
cguuccuucuugccccgca

SEQ ID NO: 4012 - RNA, 19 nt, Artificial Sequence
  Description of Artificial Sequence: Synthetic oligonucleotide
ccguuccuucuugccccgc

SEQ ID NO: 4013 - RNA, 19 nt, Artificial Sequence
  Description of Artificial Sequence: Synthetic oligonucleotide
uccguuccuucuugccccg

SEQ ID NO: 4014 - RNA, 19 nt, Artificial Sequence
  Description of Artificial Sequence: Synthetic oligonucleotide
uuccguuccuucuugcccc

SEQ ID NO: 4015 - RNA, 19 nt, Artificial Sequence
  Description of Artificial Sequence: Synthetic oligonucleotide
cuuccguuccuucuugccc

SEQ ID NO: 4016 - RNA, 19 nt, Artificial Sequence
  Description of Artificial Sequence: Synthetic oligonucleotide
gcuuccguuccuucuugcc

SEQ ID NO: 4017 - RNA, 19 nt, Artificial Sequence
  Description of Artificial Sequence: Synthetic oligonucleotide
cgcuuccguuccuucuugc

SEQ ID NO: 4018 - RNA, 19 nt, Artificial Sequence
  Description of Artificial Sequence: Synthetic oligonucleotide
ccgcuuccguuccuucuug

SEQ ID NO: 4019 - RNA, 19 nt, Artificial Sequence
  Description of Artificial Sequence: Synthetic oligonucleotide
accgcuuccguuccuucuu

SEQ ID NO: 4020 - RNA, 19 nt, Artificial Sequence
  Description of Artificial Sequence: Synthetic oligonucleotide
caccgcuuccguuccuucu

SEQ ID NO: 4021 - RNA, 19 nt, Artificial Sequence
  Description of Artificial Sequence: Synthetic oligonucleotide
gcaccgcuuccguuccuuc

SEQ ID NO: 4022 - RNA, 19 nt, Artificial Sequence
  Description of Artificial Sequence: Synthetic oligonucleotide
cgcaccgcuuccguuccuu

SEQ ID NO: 4023 - RNA, 19 nt, Artificial Sequence
  Description of Artificial Sequence: Synthetic oligonucleotide
ucgcaccgcuuccguuccu

SEQ ID NO: 4024 - RNA, 19 nt, Artificial Sequence
  Description of Artificial Sequence: Synthetic oligonucleotide
aucgcaccgcuuccguucc

SEQ ID NO: 4025 - RNA, 19 nt, Artificial Sequence
  Description of Artificial Sequence: Synthetic oligonucleotide
gaucgcaccgcuuccguuc

SEQ ID NO: 4026 - RNA, 19 nt, Artificial Sequence
  Description of Artificial Sequence: Synthetic oligonucleotide
ggaucgcaccgcuuccguu

SEQ ID NO: 4027 - RNA, 19 nt, Artificial Sequence
  Description of Artificial Sequence: Synthetic oligonucleotide
uggaucgcaccgcuuccgu

SEQ ID NO: 4028 - RNA, 19 nt, Artificial Sequence
  Description of Artificial Sequence: Synthetic oligonucleotide
guggaucgcaccgcuuccg

SEQ ID NO: 4029 - RNA, 19 nt, Artificial Sequence
  Description of Artificial Sequence: Synthetic oligonucleotide
uguggaucgcaccgcuucc

SEQ ID NO: 4030 - RNA, 19 nt, Artificial Sequence
  Description of Artificial Sequence: Synthetic oligonucleotide
cuguggaucgcaccgcuuc

SEQ ID NO: 4031 - RNA, 19 nt, Artificial Sequence
  Description of Artificial Sequence: Synthetic oligonucleotide
ccuguggaucgcaccgcuu

SEQ ID NO: 4032 - RNA, 19 nt, Artificial Sequence
  Description of Artificial Sequence: Synthetic oligonucleotide
cccuguggaucgcaccgcu

SEQ ID NO: 4033 - RNA, 19 nt, Artificial Sequence
  Description of Artificial Sequence: Synthetic oligonucleotide
gcccuguggaucgcaccgc

SEQ ID NO: 4034 - RNA, 19 nt, Artificial Sequence
  Description of Artificial Sequence: Synthetic oligonucleotide
agcccuguggaucgcaccg

SEQ ID NO: 4035 - RNA, 19 nt, Artificial Sequence
  Description of Artificial Sequence: Synthetic oligonucleotide
cagcccuguggaucgcacc

SEQ ID NO: 4036 - RNA, 19 nt, Artificial Sequence
  Description of Artificial Sequence: Synthetic oligonucleotide
ccagcccuguggaucgcac

SEQ ID NO: 4037 - RNA, 19 nt, Artificial Sequence
  Description of Artificial Sequence: Synthetic oligonucleotide
cccagcccuguggaucgca

SEQ ID NO: 4038 - RNA, 19 nt, Artificial Sequence
  Description of Artificial Sequence: Synthetic oligonucleotide
acccagcccuguggaucgc

SEQ ID NO: 4039 - RNA, 19 nt, Artificial Sequence
  Description of Artificial Sequence: Synthetic oligonucleotide
aacccagcccuguggaucg

SEQ ID NO: 4040 - RNA, 19 nt, Artificial Sequence
  Description of Artificial Sequence: Synthetic oligonucleotide
aaacccagcccuguggauc

SEQ ID NO: 4041 - RNA, 19 nt, Artificial Sequence
  Description of Artificial Sequence: Synthetic oligonucleotide
aaaacccagcccuguggau

SEQ ID NO: 4042 - RNA, 19 nt, Artificial Sequence
  Description of Artificial Sequence: Synthetic oligonucleotide
gaaaacccagcccugugga

SEQ ID NO: 4043 - RNA, 19 nt, Artificial Sequence
  Description of Artificial Sequence: Synthetic oligonucleotide
agaaaacccagcccugugg

SEQ ID NO: 4044 - RNA, 19 nt, Artificial Sequence
  Description of Artificial Sequence: Synthetic oligonucleotide
aagaaaacccagcccugug

SEQ ID NO: 4045 - RNA, 19 nt, Artificial Sequence
  Description of Artificial Sequence: Synthetic oligonucleotide
caagaaaacccagcccugu

SEQ ID NO: 4046 - RNA, 19 nt, Artificial Sequence
  Description of Artificial Sequence: Synthetic oligonucleotide
gcaagaaaacccagcccug

SEQ ID NO: 4047 - RNA, 19 nt, Artificial Sequence
  Description of Artificial Sequence: Synthetic oligonucleotide
ugcaagaaaacccagcccu

SEQ ID NO: 4048 - RNA, 19 nt, Artificial Sequence
  Description of Artificial Sequence: Synthetic oligonucleotide
gugcaagaaaacccagccc

SEQ ID NO: 4049 - RNA, 19 nt, Artificial Sequence
  Description of Artificial Sequence: Synthetic oligonucleotide
ggugcaagaaaacccagcc

SEQ ID NO: 4050 - RNA, 19 nt, Artificial Sequence
  Description of Artificial Sequence: Synthetic oligonucleotide
aggugcaagaaaacccagc

SEQ ID NO: 4051 - RNA, 19 nt, Artificial Sequence
  Description of Artificial Sequence: Synthetic oligonucleotide
aaggugcaagaaaacccag

SEQ ID NO: 4052 - RNA, 19 nt, Artificial Sequence
  Description of Artificial Sequence: Synthetic oligonucleotide
caaggugcaagaaaaccca

SEQ ID NO: 4053 - RNA, 19 nt, Artificial Sequence
  Description of Artificial Sequence: Synthetic oligonucleotide
ccaaggugcaagaaaaccc

SEQ ID NO: 4054 - RNA, 19 nt, Artificial Sequence
  Description of Artificial Sequence: Synthetic oligonucleotide
cccaaggugcaagaaaacc

SEQ ID NO: 4055 - RNA, 19 nt, Artificial Sequence
  Description of Artificial Sequence: Synthetic oligonucleotide
acccaaggugcaagaaaac

SEQ ID NO: 4056 - RNA, 19 nt, Artificial Sequence
  Description of Artificial Sequence: Synthetic oligonucleotide
gacccaaggugcaagaaaa

SEQ ID NO: 4057 - RNA, 19 nt, Artificial Sequence
  Description of Artificial Sequence: Synthetic oligonucleotide
ugacccaaggugcaagaaa

SEQ ID NO: 4058 - RNA, 19 nt, Artificial Sequence
  Description of Artificial Sequence: Synthetic oligonucleotide
gugacccaaggugcaagaa

SEQ ID NO: 4059 - RNA, 19 nt, Artificial Sequence
  Description of Artificial Sequence: Synthetic oligonucleotide
cgugacccaaggugcaaga

SEQ ID NO: 4060 - RNA, 19 nt, Artificial Sequence
  Description of Artificial Sequence: Synthetic oligonucleotide
gcgugacccaaggugcaag

SEQ ID NO: 4061 - RNA, 19 nt, Artificial Sequence
  Description of Artificial Sequence: Synthetic oligonucleotide
ggcgugacccaaggugcaa

SEQ ID NO: 4062 - RNA, 19 nt, Artificial Sequence
  Description of Artificial Sequence: Synthetic oligonucleotide
aggcgugacccaaggugca

SEQ ID NO: 4063 - RNA, 19 nt, Artificial Sequence
  Description of Artificial Sequence: Synthetic oligonucleotide
gaggcgugacccaaggugc

SEQ ID NO: 4064 - RNA, 19 nt, Artificial Sequence
  Description of Artificial Sequence: Synthetic oligonucleotide
ggaggcgugacccaaggug

SEQ ID NO: 4065 - RNA, 19 nt, Artificial Sequence
  Description of Artificial Sequence: Synthetic oligonucleotide
aggaggcgugacccaaggu

SEQ ID NO: 4066 - RNA, 19 nt, Artificial Sequence
  Description of Artificial Sequence: Synthetic oligonucleotide
aaggaggcgugacccaagg

SEQ ID NO: 4067 - RNA, 19 nt, Artificial Sequence
  Description of Artificial Sequence: Synthetic oligonucleotide
caaggaggcgugacccaag

SEQ ID NO: 4068 - RNA, 19 nt, Artificial Sequence
  Description of Artificial Sequence: Synthetic oligonucleotide
ccaaggaggcgugacccaa

SEQ ID NO: 4069 - RNA, 19 nt, Artificial Sequence
  Description of Artificial Sequence: Synthetic oligonucleotide
gccaaggaggcgugaccca

SEQ ID NO: 4070 - RNA, 19 nt, Artificial Sequence
  Description of Artificial Sequence: Synthetic oligonucleotide
cgccaaggaggcgugaccc

SEQ ID NO: 4071 - RNA, 19 nt, Artificial Sequence
  Description of Artificial Sequence: Synthetic oligonucleotide
ucgccaaggaggcgugacc

SEQ ID NO: 4072 - RNA, 19 nt, Artificial Sequence
  Description of Artificial Sequence: Synthetic oligonucleotide
cucgccaaggaggcgugac

SEQ ID NO: 4073 - RNA, 19 nt, Artificial Sequence
  Description of Artificial Sequence: Synthetic oligonucleotide
ucucgccaaggaggcguga

SEQ ID NO: 4074 - RNA, 19 nt, Artificial Sequence
  Description of Artificial Sequence: Synthetic oligonucleotide
uucucgccaaggaggcgug

SEQ ID NO: 4075 - RNA, 19 nt, Artificial Sequence
  Description of Artificial Sequence: Synthetic oligonucleotide
uuucucgccaaggaggcgu

SEQ ID NO: 4076 - RNA, 19 nt, Artificial Sequence
  Description of Artificial Sequence: Synthetic oligonucleotide
cuuucucgccaaggaggcg

SEQ ID NO: 4077 - RNA, 19 nt, Artificial Sequence
  Description of Artificial Sequence: Synthetic oligonucleotide
gcuuucucgccaaggaggc

SEQ ID NO: 4078 - RNA, 19 nt, Artificial Sequence
  Description of Artificial Sequence: Synthetic oligonucleotide
cgcuuucucgccaaggagg

SEQ ID NO: 4079 - RNA, 19 nt, Artificial Sequence
  Description of Artificial Sequence: Synthetic oligonucleotide
gcgcuuucucgccaaggag

SEQ ID NO: 4080 - RNA, 19 nt, Artificial Sequence
  Description of Artificial Sequence: Synthetic oligonucleotide
ggcgcuuucucgccaagga

SEQ ID NO: 4081 - RNA, 19 nt, Artificial Sequence
  Description of Artificial Sequence: Synthetic oligonucleotide
aggcgcuuucucgccaagg

SEQ ID NO: 4082 - RNA, 19 nt, Artificial Sequence
  Description of Artificial Sequence: Synthetic oligonucleotide
gaggcgcuuucucgccaag

SEQ ID NO: 4083 - RNA, 19 nt, Artificial Sequence
  Description of Artificial Sequence: Synthetic oligonucleotide
cgaggcgcuuucucgccaa

SEQ ID NO: 4084 - RNA, 19 nt, Artificial Sequence
  Description of Artificial Sequence: Synthetic oligonucleotide
gcgaggcgcuuucucgcca

SEQ ID NO: 4085 - RNA, 19 nt, Artificial Sequence
  Description of Artificial Sequence: Synthetic oligonucleotide
ugcgaggcgcuuucucgcc

SEQ ID NO: 4086 - RNA, 19 nt, Artificial Sequence
  Description of Artificial Sequence: Synthetic oligonucleotide
augcgaggcgcuuucucgc

SEQ ID NO: 4087 - RNA, 19 nt, Artificial Sequence
  Description of Artificial Sequence: Synthetic oligonucleotide
aaugcgaggcgcuuucucg

SEQ ID NO: 4088 - RNA, 19 nt, Artificial Sequence
  Description of Artificial Sequence: Synthetic oligonucleotide
aaaugcgaggcgcuuucuc

SEQ ID NO: 4089 - RNA, 19 nt, Artificial Sequence
  Description of Artificial Sequence: Synthetic oligonucleotide
caaaugcgaggcgcuuucu

SEQ ID NO: 4090 - RNA, 19 nt, Artificial Sequence
  Description of Artificial Sequence: Synthetic oligonucleotide
ucaaaugcgaggcgcuuuc

SEQ ID NO: 4091 - RNA, 19 nt, Artificial Sequence
  Description of Artificial Sequence: Synthetic oligonucleotide
aucaaaugcgaggcgcuuu

SEQ ID NO: 4092 - RNA, 19 nt, Artificial Sequence
  Description of Artificial Sequence: Synthetic oligonucleotide
aaucaaaugcgaggcgcuu

SEQ ID NO: 4093 - RNA, 19 nt, Artificial Sequence
  Description of Artificial Sequence: Synthetic oligonucleotide
caaucaaaugcgaggcgcu

SEQ ID NO: 4094 - RNA, 19 nt, Artificial Sequence
  Description of Artificial Sequence: Synthetic oligonucleotide
gcaaucaaaugcgaggcgc

SEQ ID NO: 4095 - RNA, 19 nt, Artificial Sequence
  Description of Artificial Sequence: Synthetic oligonucleotide
agcaaucaaaugcgaggcg

SEQ ID NO: 4096 - RNA, 19 nt, Artificial Sequence
  Description of Artificial Sequence: Synthetic oligonucleotide
aagcaaucaaaugcgaggc

SEQ ID NO: 4097 - RNA, 19 nt, Artificial Sequence
  Description of Artificial Sequence: Synthetic oligonucleotide
gaagcaaucaaaugcgagg

SEQ ID NO: 4098 - RNA, 19 nt, Artificial Sequence
  Description of Artificial Sequence: Synthetic oligonucleotide
ggaagcaaucaaaugcgag

SEQ ID NO: 4099 - RNA, 19 nt, Artificial Sequence
  Description of Artificial Sequence: Synthetic oligonucleotide
uggaagcaaucaaaugcga

SEQ ID NO: 4100 - RNA, 19 nt, Artificial Sequence
  Description of Artificial Sequence: Synthetic oligonucleotide
cuggaagcaaucaaaugcg

SEQ ID NO: 4101 - RNA, 19 nt, Artificial Sequence
  Description of Artificial Sequence: Synthetic oligonucleotide
acuggaagcaaucaaaugc

SEQ ID NO: 4102 - RNA, 19 nt, Artificial Sequence
  Description of Artificial Sequence: Synthetic oligonucleotide
aacuggaagcaaucaaaug

SEQ ID NO: 4103 - RNA, 19 nt, Artificial Sequence
  Description of Artificial Sequence: Synthetic oligonucleotide
uaacuggaagcaaucaaau

SEQ ID NO: 4104 - RNA, 19 nt, Artificial Sequence
  Description of Artificial Sequence: Synthetic oligonucleotide
auaacuggaagcaaucaaa

SEQ ID NO: 4105 - RNA, 19 nt, Artificial Sequence
  Description of Artificial Sequence: Synthetic oligonucleotide
aauaacuggaagcaaucaa

SEQ ID NO: 4106 - RNA, 19 nt, Artificial Sequence
  Description of Artificial Sequence: Synthetic oligonucleotide
caauaacuggaagcaauca

SEQ ID NO: 4107 - RNA, 19 nt, Artificial Sequence
  Description of Artificial Sequence: Synthetic oligonucleotide
gcaauaacuggaagcaauc

SEQ ID NO: 4108 - RNA, 19 nt, Artificial Sequence
  Description of Artificial Sequence: Synthetic oligonucleotide
ugcaauaacuggaagcaau

SEQ ID NO: 4109 - RNA, 19 nt, Artificial Sequence
  Description of Artificial Sequence: Synthetic oligonucleotide
cugcaauaacuggaagcaa

SEQ ID NO: 4110 - RNA, 19 nt, Artificial Sequence
  Description of Artificial Sequence: Synthetic oligonucleotide
ucugcaauaacuggaagca

SEQ ID NO: 4111 - RNA, 19 nt, Artificial Sequence
  Description of Artificial Sequence: Synthetic oligonucleotide
uucugcaauaacuggaagc

SEQ ID NO: 4112 - RNA, 19 nt, Artificial Sequence
  Description of Artificial Sequence: Synthetic oligonucleotide
guucugcaauaacuggaag

SEQ ID NO: 4113 - RNA, 19 nt, Artificial Sequence
  Description of Artificial Sequence: Synthetic oligonucleotide
aguucugcaauaacuggaa

SEQ ID NO: 4114 - RNA, 19 nt, Artificial Sequence
  Description of Artificial Sequence: Synthetic oligonucleotide
aaguucugcaauaacugga

SEQ ID NO: 4115 - RNA, 19 nt, Artificial Sequence
  Description of Artificial Sequence: Synthetic oligonucleotide
gaaguucugcaauaacugg

SEQ ID NO: 4116 - RNA, 19 nt, Artificial Sequence
  Description of Artificial Sequence: Synthetic oligonucleotide
ggaaguucugcaauaacug

SEQ ID NO: 4117 - RNA, 19 nt, Artificial Sequence
  Description of Artificial Sequence: Synthetic oligonucleotide
aggaaguucugcaauaacu

SEQ ID NO: 4118 - RNA, 19 nt, Artificial Sequence
  Description of Artificial Sequence: Synthetic oligonucleotide
caggaaguucugcaauaac

SEQ ID NO: 4119 - RNA, 19 nt, Artificial Sequence
  Description of Artificial Sequence: Synthetic oligonucleotide
acaggaaguucugcaauaa

SEQ ID NO: 4120 - RNA, 19 nt, Artificial Sequence
  Description of Artificial Sequence: Synthetic oligonucleotide
gacaggaaguucugcaaua

SEQ ID NO: 4121 - RNA, 19 nt, Artificial Sequence
  Description of Artificial Sequence: Synthetic oligonucleotide
ggacaggaaguucugcaau

SEQ ID NO: 4122 - RNA, 19 nt, Artificial Sequence
  Description of Artificial Sequence: Synthetic oligonucleotide
aggacaggaaguucugcaa

SEQ ID NO: 4123 - RNA, 19 nt, Artificial Sequence
  Description of Artificial Sequence: Synthetic oligonucleotide
caggacaggaaguucugca

SEQ ID NO: 4124 - RNA, 19 nt, Artificial Sequence
  Description of Artificial Sequence: Synthetic oligonucleotide
ccaggacaggaaguucugc

SEQ ID NO: 4125 - RNA, 19 nt, Artificial Sequence
  Description of Artificial Sequence: Synthetic oligonucleotide
accaggacaggaaguucug

SEQ ID NO: 4126 - RNA, 19 nt, Artificial Sequence
  Description of Artificial Sequence: Synthetic oligonucleotide
caccaggacaggaaguucu

SEQ ID NO: 4127 - RNA, 19 nt, Artificial Sequence
  Description of Artificial Sequence: Synthetic oligonucleotide
ccaccaggacaggaaguuc

SEQ ID NO: 4128 - RNA, 19 nt, Artificial Sequence
  Description of Artificial Sequence: Synthetic oligonucleotide
uccaccaggacaggaaguu

SEQ ID NO: 4129 - RNA, 19 nt, Artificial Sequence
  Description of Artificial Sequence: Synthetic oligonucleotide
cuccaccaggacaggaagu

SEQ ID NO: 4130 - RNA, 19 nt, Artificial Sequence
  Description of Artificial Sequence: Synthetic oligonucleotide
ucuccaccaggacaggaag

SEQ ID NO: 4131 - RNA, 19 nt, Artificial Sequence
  Description of Artificial Sequence: Synthetic oligonucleotide
uucuccaccaggacaggaa

SEQ ID NO: 4132 - RNA, 19 nt, Artificial Sequence
  Description of Artificial Sequence: Synthetic oligonucleotide
cuucuccaccaggacagga

SEQ ID NO: 4133 - RNA, 19 nt, Artificial Sequence
  Description of Artificial Sequence: Synthetic oligonucleotide
gcuucuccaccaggacagg

SEQ ID NO: 4134 - RNA, 19 nt, Artificial Sequence
  Description of Artificial Sequence: Synthetic oligonucleotide
cgcuucuccaccaggacag

SEQ ID NO: 4135 - RNA, 19 nt, Artificial Sequence
  Description of Artificial Sequence: Synthetic oligonucleotide
ccgcuucuccaccaggaca

SEQ ID NO: 4136 - RNA, 19 nt, Artificial Sequence
  Description of Artificial Sequence: Synthetic oligonucleotide
cccgcuucuccaccaggac

SEQ ID NO: 4137 - RNA, 19 nt, Artificial Sequence
  Description of Artificial Sequence: Synthetic oligonucleotide
acccgcuucuccaccagga

SEQ ID NO: 4138 - RNA, 19 nt, Artificial Sequence
  Description of Artificial Sequence: Synthetic oligonucleotide
gacccgcuucuccaccagg

SEQ ID NO: 4139 - RNA, 19 nt, Artificial Sequence
  Description of Artificial Sequence: Synthetic oligonucleotide
agacccgcuucuccaccag

SEQ ID NO: 4140 - RNA, 19 nt, Artificial Sequence
  Description of Artificial Sequence: Synthetic oligonucleotide
gagacccgcuucuccacca

SEQ ID NO: 4141 - RNA, 19 nt, Artificial Sequence
  Description of Artificial Sequence: Synthetic oligonucleotide
cgagacccgcuucuccacc

SEQ ID NO: 4142 - RNA, 19 nt, Artificial Sequence
  Description of Artificial Sequence: Synthetic oligonucleotide
gcgagacccgcuucuccac

SEQ ID NO: 4143 - RNA, 19 nt, Artificial Sequence
  Description of Artificial Sequence: Synthetic oligonucleotide
agcgagacccgcuucucca

SEQ ID NO: 4144 - RNA, 19 nt, Artificial Sequence
  Description of Artificial Sequence: Synthetic oligonucleotide
aagcgagacccgcuucucc

SEQ ID NO: 4145 - RNA, 19 nt, Artificial Sequence
  Description of Artificial Sequence: Synthetic oligonucleotide
caagcgagacccgcuucuc

SEQ ID NO: 4146 - RNA, 19 nt, Artificial Sequence
  Description of Artificial Sequence: Synthetic oligonucleotide
ccaagcgagacccgcuucu

SEQ ID NO: 4147 - RNA, 19 nt, Artificial Sequence
  Description of Artificial Sequence: Synthetic oligonucleotide
cccaagcgagacccgcuuc

SEQ ID NO: 4148 - RNA, 19 nt, Artificial Sequence
  Description of Artificial Sequence: Synthetic oligonucleotide
acccaagcgagacccgcuu

SEQ ID NO: 4149 - RNA, 19 nt, Artificial Sequence
  Description of Artificial Sequence: Synthetic oligonucleotide
aacccaagcgagacccgcu

SEQ ID NO: 4150 - RNA, 19 nt, Artificial Sequence
  Description of Artificial Sequence: Synthetic oligonucleotide
gaacccaagcgagacccgc

SEQ ID NO: 4151 - RNA, 19 nt, Artificial Sequence
  Description of Artificial Sequence: Synthetic oligonucleotide
ggaacccaagcgagacccg

SEQ ID NO: 4152 - RNA, 19 nt, Artificial Sequence
  Description of Artificial Sequence: Synthetic oligonucleotide
cggaacccaagcgagaccc

SEQ ID NO: 4153 - RNA, 19 nt, Artificial Sequence
  Description of Artificial Sequence: Synthetic oligonucleotide
gcggaacccaagcgagacc

SEQ ID NO: 4154 - RNA, 19 nt, Artificial Sequence
  Description of Artificial Sequence: Synthetic oligonucleotide
agcggaacccaagcgagac

SEQ ID NO: 4155 - RNA, 19 nt, Artificial Sequence
  Description of Artificial Sequence: Synthetic oligonucleotide
uagcggaacccaagcgaga

SEQ ID NO: 4156 - RNA, 19 nt, Artificial Sequence
  Description of Artificial Sequence: Synthetic oligonucleotide
uuagcggaacccaagcgag

SEQ ID NO: 4157 - RNA, 19 nt, Artificial Sequence
  Description of Artificial Sequence: Synthetic oligonucleotide
auuagcggaacccaagcga

SEQ ID NO: 4158 - RNA, 19 nt, Artificial Sequence
  Description of Artificial Sequence: Synthetic oligonucleotide
aauuagcggaacccaagcg

SEQ ID NO: 4159 - RNA, 19 nt, Artificial Sequence
  Description of Artificial Sequence: Synthetic oligonucleotide
aaauuagcggaacccaagc

SEQ ID NO: 4160 - RNA, 19 nt, Artificial Sequence
  Description of Artificial Sequence: Synthetic oligonucleotide
gaaauuagcggaacccaag

SEQ ID NO: 4161 - RNA, 19 nt, Artificial Sequence
  Description of Artificial Sequence: Synthetic oligonucleotide
agaaauuagcggaacccaa

SEQ ID NO: 4162 - RNA, 19 nt, Artificial Sequence
  Description of Artificial Sequence: Synthetic oligonucleotide
cagaaauuagcggaaccca

SEQ ID NO: 4163 - RNA, 19 nt, Artificial Sequence
  Description of Artificial Sequence: Synthetic oligonucleotide
acagaaauuagcggaaccc

SEQ ID NO: 4164 - RNA, 19 nt, Artificial Sequence
  Description of Artificial Sequence: Synthetic oligonucleotide
gacagaaauuagcggaacc

SEQ ID NO: 4165 - RNA, 19 nt, Artificial Sequence
  Description of Artificial Sequence: Synthetic oligonucleotide
ggacagaaauuagcggaac

SEQ ID NO: 4166 - RNA, 19 nt, Artificial Sequence
  Description of Artificial Sequence: Synthetic oligonucleotide
aggacagaaauuagcggaa

SEQ ID NO: 4167 - RNA, 19 nt, Artificial Sequence
  Description of Artificial Sequence: Synthetic oligonucleotide
caggacagaaauuagcgga

SEQ ID NO: 4168 - RNA, 19 nt, Artificial Sequence
  Description of Artificial Sequence: Synthetic oligonucleotide
ucaggacagaaauuagcgg

SEQ ID NO: 4169 - RNA, 19 nt, Artificial Sequence
  Description of Artificial Sequence: Synthetic oligonucleotide
cucaggacagaaauuagcg

SEQ ID NO: 4170 - RNA, 19 nt, Artificial Sequence
  Description of Artificial Sequence: Synthetic oligonucleotide
ccucaggacagaaauuagc

SEQ ID NO: 4171 - RNA, 19 nt, Artificial Sequence
  Description of Artificial Sequence: Synthetic oligonucleotide
gccucaggacagaaauuag

SEQ ID NO: 4172 - RNA, 19 nt, Artificial Sequence
  Description of Artificial Sequence: Synthetic oligonucleotide
cgccucaggacagaaauua

SEQ ID NO: 4173 - RNA, 19 nt, Artificial Sequence
  Description of Artificial Sequence: Synthetic oligonucleotide
acgccucaggacagaaauu

SEQ ID NO: 4174 - RNA, 19 nt, Artificial Sequence
  Description of Artificial Sequence: Synthetic oligonucleotide
cacgccucaggacagaaau

SEQ ID NO: 4175 - RNA, 19 nt, Artificial Sequence
  Description of Artificial Sequence: Synthetic oligonucleotide
ucacgccucaggacagaaa

SEQ ID NO: 4176 - RNA, 19 nt, Artificial Sequence
  Description of Artificial Sequence: Synthetic oligonucleotide
cucacgccucaggacagaa

SEQ ID NO: 4177 - RNA, 19 nt, Artificial Sequence
  Description of Artificial Sequence: Synthetic oligonucleotide
ucucacgccucaggacaga

SEQ ID NO: 4178 - RNA, 19 nt, Artificial Sequence
  Description of Artificial Sequence: Synthetic oligonucleotide
gucucacgccucaggacag

SEQ ID NO: 4179 - RNA, 19 nt, Artificial Sequence
  Description of Artificial Sequence: Synthetic oligonucleotide
agucucacgccucaggaca

SEQ ID NO: 4180 - RNA, 19 nt, Artificial Sequence
  Description of Artificial Sequence: Synthetic oligonucleotide
cagucucacgccucaggac

SEQ ID NO: 4181 - RNA, 19 nt, Artificial Sequence
  Description of Artificial Sequence: Synthetic oligonucleotide
ucagucucacgccucagga

SEQ ID NO: 4182 - RNA, 19 nt, Artificial Sequence
  Description of Artificial Sequence: Synthetic oligonucleotide
cucagucucacgccucagg

SEQ ID NO: 4183 - RNA, 19 nt, Artificial Sequence
  Description of Artificial Sequence: Synthetic oligonucleotide
acucagucucacgccucag

SEQ ID NO: 4184 - RNA, 19 nt, Artificial Sequence
  Description of Artificial Sequence: Synthetic oligonucleotide
aacucagucucacgccuca

SEQ ID NO: 4185 - RNA, 19 nt, Artificial Sequence
  Description of Artificial Sequence: Synthetic oligonucleotide
gaacucagucucacgccuc

SEQ ID NO: 4186 - RNA, 19 nt, Artificial Sequence
  Description of Artificial Sequence: Synthetic oligonucleotide
ugaacucagucucacgccu

SEQ ID NO: 4187 - RNA, 19 nt, Artificial Sequence
  Description of Artificial Sequence: Synthetic oligonucleotide
augaacucagucucacgcc

SEQ ID NO: 4188 - RNA, 19 nt, Artificial Sequence
  Description of Artificial Sequence: Synthetic oligonucleotide
uaugaacucagucucacgc

SEQ ID NO: 4189 - RNA, 19 nt, Artificial Sequence
  Description of Artificial Sequence: Synthetic oligonucleotide
cuaugaacucagucucacg

SEQ ID NO: 4190 - RNA, 19 nt, Artificial Sequence
  Description of Artificial Sequence: Synthetic oligonucleotide
ccuaugaacucagucucac

SEQ ID NO: 4191 - RNA, 19 nt, Artificial Sequence
  Description of Artificial Sequence: Synthetic oligonucleotide
cccuaugaacucagucuca

SEQ ID NO: 4192 - RNA, 19 nt, Artificial Sequence
  Description of Artificial Sequence: Synthetic oligonucleotide
acccuaugaacucagucuc

SEQ ID NO: 4193 - RNA, 19 nt, Artificial Sequence
  Description of Artificial Sequence: Synthetic oligonucleotide
gacccuaugaacucagucu

SEQ ID NO: 4194 - RNA, 19 nt, Artificial Sequence
  Description of Artificial Sequence: Synthetic oligonucleotide
ggacccuaugaacucaguc

SEQ ID NO: 4195 - RNA, 19 nt, Artificial Sequence
  Description of Artificial Sequence: Synthetic oligonucleotide
aggacccuaugaacucagu

SEQ ID NO: 4196 - RNA, 19 nt, Artificial Sequence
  Description of Artificial Sequence: Synthetic oligonucleotide
caggacccuaugaacucag

SEQ ID NO: 4197 - RNA, 19 nt, Artificial Sequence
  Description of Artificial Sequence: Synthetic oligonucleotide
ccaggacccuaugaacuca

SEQ ID NO: 4198 - RNA, 19 nt, Artificial Sequence
  Description of Artificial Sequence: Synthetic oligonucleotide
cccaggacccuaugaacuc

SEQ ID NO: 4199 - RNA, 19 nt, Artificial Sequence
  Description of Artificial Sequence: Synthetic oligonucleotide
acccaggacccuaugaacu

SEQ ID NO: 4200 - RNA, 19 nt, Artificial Sequence
  Description of Artificial Sequence: Synthetic oligonucleotide
gacccaggacccuaugaac

SEQ ID NO: 4201 - RNA, 19 nt, Artificial Sequence
  Description of Artificial Sequence: Synthetic oligonucleotide
ggacccaggacccuaugaa

SEQ ID NO: 4202 - RNA, 19 nt, Artificial Sequence
  Description of Artificial Sequence: Synthetic oligonucleotide
gggacccaggacccuauga

SEQ ID NO: 4203 - RNA, 19 nt, Artificial Sequence
  Description of Artificial Sequence: Synthetic oligonucleotide
ggggacccaggacccuaug

SEQ ID NO: 4204 - RNA, 19 nt, Artificial Sequence
  Description of Artificial Sequence: Synthetic oligonucleotide
cggggacccaggacccuau

SEQ ID NO: 4205 - RNA, 19 nt, Artificial Sequence
  Description of Artificial Sequence: Synthetic oligonucleotide
ucggggacccaggacccua

SEQ ID NO: 4206 - RNA, 19 nt, Artificial Sequence
  Description of Artificial Sequence: Synthetic oligonucleotide
uucggggacccaggacccu

SEQ ID NO: 4207 - RNA, 19 nt, Artificial Sequence
  Description of Artificial Sequence: Synthetic oligonucleotide
guucggggacccaggaccc

SEQ ID NO: 4208 - RNA, 19 nt, Artificial Sequence
  Description of Artificial Sequence: Synthetic oligonucleotide
gguucggggacccaggacc

SEQ ID NO: 4209 - RNA, 19 nt, Artificial Sequence
  Description of Artificial Sequence: Synthetic oligonucleotide
ugguucggggacccaggac

SEQ ID NO: 4210 - RNA, 19 nt, Artificial Sequence
  Description of Artificial Sequence: Synthetic oligonucleotide
cugguucggggacccagga

SEQ ID NO: 4211 - RNA, 19 nt, Artificial Sequence
  Description of Artificial Sequence: Synthetic oligonucleotide
ccugguucggggacccagg

SEQ ID NO: 4212 - RNA, 19 nt, Artificial Sequence
  Description of Artificial Sequence: Synthetic oligonucleotide
uccugguucggggacccag

SEQ ID NO: 4213 - RNA, 19 nt, Artificial Sequence
  Description of Artificial Sequence: Synthetic oligonucleotide
uuccugguucggggaccca

SEQ ID NO: 4214 - RNA, 19 nt, Artificial Sequence
  Description of Artificial Sequence: Synthetic oligonucleotide
cuuccugguucggggaccc

SEQ ID NO: 4215 - RNA, 19 nt, Artificial Sequence
  Description of Artificial Sequence: Synthetic oligonucleotide
ccuuccugguucggggacc

SEQ ID NO: 4216 - RNA, 19 nt, Artificial Sequence
  Description of Artificial Sequence: Synthetic oligonucleotide
cccuuccugguucggggac

SEQ ID NO: 4217 - RNA, 19 nt, Artificial Sequence
  Description of Artificial Sequence: Synthetic oligonucleotide
acccuuccugguucgggga

SEQ ID NO: 4218 - RNA, 19 nt, Artificial Sequence
  Description of Artificial Sequence: Synthetic oligonucleotide
aacccuuccugguucgggg

SEQ ID NO: 4219 - RNA, 19 nt, Artificial Sequence
  Description of Artificial Sequence: Synthetic oligonucleotide
caacccuuccugguucggg

SEQ ID NO: 4220 - RNA, 19 nt, Artificial Sequence
  Description of Artificial Sequence: Synthetic oligonucleotide
ucaacccuuccugguucgg

SEQ ID NO: 4221 - RNA, 19 nt, Artificial Sequence
  Description of Artificial Sequence: Synthetic oligonucleotide
cucaacccuuccugguucg

SEQ ID NO: 4222 - RNA, 19 nt, Artificial Sequence
  Description of Artificial Sequence: Synthetic oligonucleotide
ccucaacccuuccugguuc

SEQ ID NO: 4223 - RNA, 19 nt, Artificial Sequence
  Description of Artificial Sequence: Synthetic oligonucleotide
cccucaacccuuccugguu

SEQ ID NO: 4224 - RNA, 19 nt, Artificial Sequence
  Description of Artificial Sequence: Synthetic oligonucleotide
ucccucaacccuuccuggu

SEQ ID NO: 4225 - RNA, 19 nt, Artificial Sequence
  Description of Artificial Sequence: Synthetic oligonucleotide
uucccucaacccuuccugg

SEQ ID NO: 4226 - RNA, 19 nt, Artificial Sequence
  Description of Artificial Sequence: Synthetic oligonucleotide
guucccucaacccuuccug

SEQ ID NO: 4227 - RNA, 19 nt, Artificial Sequence
  Description of Artificial Sequence: Synthetic oligonucleotide
uguucccucaacccuuccu

SEQ ID NO: 4228 - RNA, 19 nt, Artificial Sequence
  Description of Artificial Sequence: Synthetic oligonucleotide
guguucccucaacccuucc

SEQ ID NO: 4229 - RNA, 19 nt, Artificial Sequence
  Description of Artificial Sequence: Synthetic oligonucleotide
uguguucccucaacccuuc

SEQ ID NO: 4230 - RNA, 19 nt, Artificial Sequence
  Description of Artificial Sequence: Synthetic oligonucleotide
uuguguucccucaacccuu

SEQ ID NO: 4231 - RNA, 19 nt, Artificial Sequence
  Description of Artificial Sequence: Synthetic oligonucleotide
auuguguucccucaacccu

SEQ ID NO: 4232 - RNA, 19 nt, Artificial Sequence
  Description of Artificial Sequence: Synthetic oligonucleotide
gauuguguucccucaaccc

SEQ ID NO: 4233 - RNA, 19 nt, Artificial Sequence
  Description of Artificial Sequence: Synthetic oligonucleotide
agauuguguucccucaacc

SEQ ID NO: 4234 - RNA, 19 nt, Artificial Sequence
  Description of Artificial Sequence: Synthetic oligonucleotide
cagauuguguucccucaac

SEQ ID NO: 4235 - RNA, 19 nt, Artificial Sequence
  Description of Artificial Sequence: Synthetic oligonucleotide
gcagauuguguucccucaa

SEQ ID NO: 4236 - RNA, 19 nt, Artificial Sequence
  Description of Artificial Sequence: Synthetic oligonucleotide
ugcagauuguguucccuca

SEQ ID NO: 4237 - RNA, 19 nt, Artificial Sequence
  Description of Artificial Sequence: Synthetic oligonucleotide
uugcagauuguguucccuc

SEQ ID NO: 4238 - RNA, 19 nt, Artificial Sequence
  Description of Artificial Sequence: Synthetic oligonucleotide
cuugcagauuguguucccu

SEQ ID NO: 4239 - RNA, 19 nt, Artificial Sequence
  Description of Artificial Sequence: Synthetic oligonucleotide
gcuugcagauuguguuccc

SEQ ID NO: 4240 - RNA, 19 nt, Artificial Sequence
  Description of Artificial Sequence: Synthetic oligonucleotide
ggcuugcagauuguguucc

SEQ ID NO: 4241 - RNA, 19 nt, Artificial Sequence
  Description of Artificial Sequence: Synthetic oligonucleotide
gggcuugcagauuguguuc

SEQ ID NO: 4242 - RNA, 19 nt, Artificial Sequence
  Description of Artificial Sequence: Synthetic oligonucleotide
ggggcuugcagauuguguu

SEQ ID NO: 4243 - RNA, 19 nt, Artificial Sequence
  Description of Artificial Sequence: Synthetic oligonucleotide
gggggcuugcagauugugu

SEQ ID NO: 4244 - RNA, 19 nt, Artificial Sequence
  Description of Artificial Sequence: Synthetic oligonucleotide
cgggggcuugcagauugug

SEQ ID NO: 4245 - RNA, 19 nt, Artificial Sequence
  Description of Artificial Sequence: Synthetic oligonucleotide
gcgggggcuugcagauugu

SEQ ID NO: 4246 - RNA, 19 nt, Artificial Sequence
  Description of Artificial Sequence: Synthetic oligonucleotide
cgcgggggcuugcagauug

SEQ ID NO: 4247 - RNA, 19 nt, Artificial Sequence
  Description of Artificial Sequence: Synthetic oligonucleotide
ucgcgggggcuugcagauu

SEQ ID NO: 4248 - RNA, 19 nt, Artificial Sequence
  Description of Artificial Sequence: Synthetic oligonucleotide
gucgcgggggcuugcagau

SEQ ID NO: 4249 - RNA, 19 nt, Artificial Sequence
  Description of Artificial Sequence: Synthetic oligonucleotide
ggucgcgggggcuugcaga

SEQ ID NO: 4250 - RNA, 19 nt, Artificial Sequence
  Description of Artificial Sequence: Synthetic oligonucleotide
gggucgcgggggcuugcag

SEQ ID NO: 4251 - RNA, 19 nt, Artificial Sequence
  Description of Artificial Sequence: Synthetic oligonucleotide
ugggucgcgggggcuugca

SEQ ID NO: 4252 - RNA, 19 nt, Artificial Sequence
  Description of Artificial Sequence: Synthetic oligonucleotide
uugggucgcgggggcuugc

SEQ ID NO: 4253 - RNA, 19 nt, Artificial Sequence
  Description of Artificial Sequence: Synthetic oligonucleotide
cuugggucgcgggggcuug

SEQ ID NO: 4254 - RNA, 19 nt, Artificial Sequence
  Description of Artificial Sequence: Synthetic oligonucleotide
acuugggucgcgggggcuu

SEQ ID NO: 4255 - RNA, 19 nt, Artificial Sequence
  Description of Artificial Sequence: Synthetic oligonucleotide
cacuugggucgcgggggcu

SEQ ID NO: 4256 - RNA, 19 nt, Artificial Sequence
  Description of Artificial Sequence: Synthetic oligonucleotide
ucacuugggucgcgggggc

SEQ ID NO: 4257 - RNA, 19 nt, Artificial Sequence
  Description of Artificial Sequence: Synthetic oligonucleotide
cucacuugggucgcggggg

SEQ ID NO: 4258 - RNA, 19 nt, Artificial Sequence
  Description of Artificial Sequence: Synthetic oligonucleotide
ccucacuugggucgcgggg

SEQ ID NO: 4259 - RNA, 19 nt, Artificial Sequence
  Description of Artificial Sequence: Synthetic oligonucleotide
cccucacuugggucgcggg

SEQ ID NO: 4260 - RNA, 19 nt, Artificial Sequence
  Description of Artificial Sequence: Synthetic oligonucleotide
ccccucacuugggucgcgg

SEQ ID NO: 4261 - RNA, 19 nt, Artificial Sequence
  Description of Artificial Sequence: Synthetic oligonucleotide
gccccucacuugggucgcg

SEQ ID NO: 4262 - RNA, 19 nt, Artificial Sequence
  Description of Artificial Sequence: Synthetic oligonucleotide
ggccccucacuugggucgc

SEQ ID NO: 4263 - RNA, 19 nt, Artificial Sequence
  Description of Artificial Sequence: Synthetic oligonucleotide
gggccccucacuugggucg

SEQ ID NO: 4264 - RNA, 19 nt, Artificial Sequence
  Description of Artificial Sequence: Synthetic oligonucleotide
ggggccccucacuuggguc

SEQ ID NO: 4265 - RNA, 19 nt, Artificial Sequence
  Description of Artificial Sequence: Synthetic oligonucleotide
cggggccccucacuugggu

SEQ ID NO: 4266 - RNA, 19 nt, Artificial Sequence
  Description of Artificial Sequence: Synthetic oligonucleotide
acggggccccucacuuggg

SEQ ID NO: 4267 - RNA, 19 nt, Artificial Sequence
  Description of Artificial Sequence: Synthetic oligonucleotide
cacggggccccucacuugg

SEQ ID NO: 4268 - RNA, 19 nt, Artificial Sequence
  Description of Artificial Sequence: Synthetic oligonucleotide
acacggggccccucacuug

SEQ ID NO: 4269 - RNA, 19 nt, Artificial Sequence
  Description of Artificial Sequence: Synthetic oligonucleotide
aacacggggccccucacuu

SEQ ID NO: 4270 - RNA, 19 nt, Artificial Sequence
  Description of Artificial Sequence: Synthetic oligonucleotide
caacacggggccccucacu

SEQ ID NO: 4271 - RNA, 19 nt, Artificial Sequence
  Description of Artificial Sequence: Synthetic oligonucleotide
ccaacacggggccccucac

SEQ ID NO: 4272 - RNA, 19 nt, Artificial Sequence
  Description of Artificial Sequence: Synthetic oligonucleotide
cccaacacggggccccuca

SEQ ID NO: 4273 - RNA, 19 nt, Artificial Sequence
  Description of Artificial Sequence: Synthetic oligonucleotide
ccccaacacggggccccuc

SEQ ID NO: 4274 - RNA, 19 nt, Artificial Sequence
  Description of Artificial Sequence: Synthetic oligonucleotide
accccaacacggggccccu

SEQ ID NO: 4275 - RNA, 19 nt, Artificial Sequence
  Description of Artificial Sequence: Synthetic oligonucleotide
gaccccaacacggggcccc

SEQ ID NO: 4276 - RNA, 19 nt, Artificial Sequence
  Description of Artificial Sequence: Synthetic oligonucleotide
ggaccccaacacggggccc

SEQ ID NO: 4277 - RNA, 19 nt, Artificial Sequence
  Description of Artificial Sequence: Synthetic oligonucleotide
aggaccccaacacggggcc

SEQ ID NO: 4278 - RNA, 19 nt, Artificial Sequence
  Description of Artificial Sequence: Synthetic oligonucleotide
gaggaccccaacacggggc

SEQ ID NO: 4279 - RNA, 19 nt, Artificial Sequence
  Description of Artificial Sequence: Synthetic oligonucleotide
ggaggaccccaacacgggg

SEQ ID NO: 4280 - RNA, 19 nt, Artificial Sequence
  Description of Artificial Sequence: Synthetic oligonucleotide
gggaggaccccaacacggg

SEQ ID NO: 4281 - RNA, 19 nt, Artificial Sequence
  Description of Artificial Sequence: Synthetic oligonucleotide
agggaggaccccaacacgg

SEQ ID NO: 4282 - RNA, 19 nt, Artificial Sequence
  Description of Artificial Sequence: Synthetic oligonucleotide
gagggaggaccccaacacg

SEQ ID NO: 4283 - RNA, 19 nt, Artificial Sequence
  Description of Artificial Sequence: Synthetic oligonucleotide
ggagggaggaccccaacac

SEQ ID NO: 4284 - RNA, 19 nt, Artificial Sequence
  Description of Artificial Sequence: Synthetic oligonucleotide
gggagggaggaccccaaca

SEQ ID NO: 4285 - RNA, 19 nt, Artificial Sequence
  Description of Artificial Sequence: Synthetic oligonucleotide
agggagggaggaccccaac

SEQ ID NO: 4286 - RNA, 19 nt, Artificial Sequence
  Description of Artificial Sequence: Synthetic oligonucleotide
aagggagggaggaccccaa

SEQ ID NO: 4287 - RNA, 19 nt, Artificial Sequence
  Description of Artificial Sequence: Synthetic oligonucleotide
aaagggagggaggacccca

SEQ ID NO: 4288 - RNA, 19 nt, Artificial Sequence
  Description of Artificial Sequence: Synthetic oligonucleotide
caaagggagggaggacccc

SEQ ID NO: 4289 - RNA, 19 nt, Artificial Sequence
  Description of Artificial Sequence: Synthetic oligonucleotide
gcaaagggagggaggaccc

SEQ ID NO: 4290 - RNA, 19 nt, Artificial Sequence
  Description of Artificial Sequence: Synthetic oligonucleotide
ugcaaagggagggaggacc

SEQ ID NO: 4291 - RNA, 19 nt, Artificial Sequence
  Description of Artificial Sequence: Synthetic oligonucleotide
augcaaagggagggaggac

SEQ ID NO: 4292 - RNA, 19 nt, Artificial Sequence
  Description of Artificial Sequence: Synthetic oligonucleotide
aaugcaaagggagggagga

SEQ ID NO: 4293 - RNA, 19 nt, Artificial Sequence
  Description of Artificial Sequence: Synthetic oligonucleotide
gaaugcaaagggagggagg

SEQ ID NO: 4294 - RNA, 19 nt, Artificial Sequence
  Description of Artificial Sequence: Synthetic oligonucleotide
ggaaugcaaagggagggag

SEQ ID NO: 4295 - RNA, 19 nt, Artificial Sequence
  Description of Artificial Sequence: Synthetic oligonucleotide
gggaaugcaaagggaggga

SEQ ID NO: 4296 - RNA, 19 nt, Artificial Sequence
  Description of Artificial Sequence: Synthetic oligonucleotide
ugggaaugcaaagggaggg

SEQ ID NO: 4297 - RNA, 19 nt, Artificial Sequence
  Description of Artificial Sequence: Synthetic oligonucleotide
gugggaaugcaaagggagg

SEQ ID NO: 4298 - RNA, 19 nt, Artificial Sequence
  Description of Artificial Sequence: Synthetic oligonucleotide
ggugggaaugcaaagggag

SEQ ID NO: 4299 - RNA, 19 nt, Artificial Sequence
  Description of Artificial Sequence: Synthetic oligonucleotide
gggugggaaugcaaaggga

SEQ ID NO: 4300 - RNA, 19 nt, Artificial Sequence
  Description of Artificial Sequence: Synthetic oligonucleotide
ggggugggaaugcaaaggg

SEQ ID NO: 4301 - RNA, 19 nt, Artificial Sequence
  Description of Artificial Sequence: Synthetic oligonucleotide
aggggugggaaugcaaagg

SEQ ID NO: 4302 - RNA, 19 nt, Artificial Sequence
  Description of Artificial Sequence: Synthetic oligonucleotide
gaggggugggaaugcaaag

SEQ ID NO: 4303 - RNA, 19 nt, Artificial Sequence
  Description of Artificial Sequence: Synthetic oligonucleotide
ggaggggugggaaugcaaa

SEQ ID NO: 4304 - RNA, 19 nt, Artificial Sequence
  Description of Artificial Sequence: Synthetic oligonucleotide
cggaggggugggaaugcaa

SEQ ID NO: 4305 - RNA, 19 nt, Artificial Sequence
  Description of Artificial Sequence: Synthetic oligonucleotide
ccggaggggugggaaugca

SEQ ID NO: 4306 - RNA, 19 nt, Artificial Sequence
  Description of Artificial Sequence: Synthetic oligonucleotide
cccggaggggugggaaugc

SEQ ID NO: 4307 - RNA, 19 nt, Artificial Sequence
  Description of Artificial Sequence: Synthetic oligonucleotide
gcccggaggggugggaaug

SEQ ID NO: 4308 - RNA, 19 nt, Artificial Sequence
  Description of Artificial Sequence: Synthetic oligonucleotide
agcccggaggggugggaau

SEQ ID NO: 4309 - RNA, 19 nt, Artificial Sequence
  Description of Artificial Sequence: Synthetic oligonucleotide
aagcccggaggggugggaa

SEQ ID NO: 4310 - RNA, 19 nt, Artificial Sequence
  Description of Artificial Sequence: Synthetic oligonucleotide
aaagcccggagggguggga

SEQ ID NO: 4311 - RNA, 19 nt, Artificial Sequence
  Description of Artificial Sequence: Synthetic oligonucleotide
caaagcccggagggguggg

SEQ ID NO: 4312 - RNA, 19 nt, Artificial Sequence
  Description of Artificial Sequence: Synthetic oligonucleotide
gcaaagcccggaggggugg

SEQ ID NO: 4313 - RNA, 19 nt, Artificial Sequence
  Description of Artificial Sequence: Synthetic oligonucleotide
cgcaaagcccggaggggug

SEQ ID NO: 4314 - RNA, 19 nt, Artificial Sequence
  Description of Artificial Sequence: Synthetic oligonucleotide
acgcaaagcccggaggggu

SEQ ID NO: 4315 - RNA, 19 nt, Artificial Sequence
  Description of Artificial Sequence: Synthetic oligonucleotide
gacgcaaagcccggagggg

SEQ ID NO: 4316 - RNA, 19 nt, Artificial Sequence
  Description of Artificial Sequence: Synthetic oligonucleotide
agacgcaaagcccggaggg

SEQ ID NO: 4317 - RNA, 19 nt, Artificial Sequence
  Description of Artificial Sequence: Synthetic oligonucleotide
aagacgcaaagcccggagg

SEQ ID NO: 4318 - RNA, 19 nt, Artificial Sequence
  Description of Artificial Sequence: Synthetic oligonucleotide
gaagacgcaaagcccggag

SEQ ID NO: 4319 - RNA, 19 nt, Artificial Sequence
  Description of Artificial Sequence: Synthetic oligonucleotide
ggaagacgcaaagcccgga

SEQ ID NO: 4320 - RNA, 19 nt, Artificial Sequence
  Description of Artificial Sequence: Synthetic oligonucleotide
aggaagacgcaaagcccgg

SEQ ID NO: 4321 - RNA, 19 nt, Artificial Sequence
  Description of Artificial Sequence: Synthetic oligonucleotide
caggaagacgcaaagcccg

SEQ ID NO: 4322 - RNA, 19 nt, Artificial Sequence
  Description of Artificial Sequence: Synthetic oligonucleotide
ccaggaagacgcaaagccc

SEQ ID NO: 4323 - RNA, 19 nt, Artificial Sequence
  Description of Artificial Sequence: Synthetic oligonucleotide
cccaggaagacgcaaagcc

SEQ ID NO: 4324 - RNA, 19 nt, Artificial Sequence
  Description of Artificial Sequence: Synthetic oligonucleotide
ccccaggaagacgcaaagc

SEQ ID NO: 4325 - RNA, 19 nt, Artificial Sequence
  Description of Artificial Sequence: Synthetic oligonucleotide
uccccaggaagacgcaaag

SEQ ID NO: 4326 - RNA, 19 nt, Artificial Sequence
  Description of Artificial Sequence: Synthetic oligonucleotide
guccccaggaagacgcaaa

SEQ ID NO: 4327 - RNA, 19 nt, Artificial Sequence
  Description of Artificial Sequence: Synthetic oligonucleotide
gguccccaggaagacgcaa

SEQ ID NO: 4328 - RNA, 19 nt, Artificial Sequence
  Description of Artificial Sequence: Synthetic oligonucleotide
ggguccccaggaagacgca

SEQ ID NO: 4329 - RNA, 19 nt, Artificial Sequence
  Description of Artificial Sequence: Synthetic oligonucleotide
gggguccccaggaagacgc

SEQ ID NO: 4330 - RNA, 19 nt, Artificial Sequence
  Description of Artificial Sequence: Synthetic oligonucleotide
ggggguccccaggaagacg

SEQ ID NO: 4331 - RNA, 19 nt, Artificial Sequence
  Description of Artificial Sequence: Synthetic oligonucleotide
aggggguccccaggaagac

SEQ ID NO: 4332 - RNA, 19 nt, Artificial Sequence
  Description of Artificial Sequence: Synthetic oligonucleotide
gaggggguccccaggaaga

SEQ ID NO: 4333 - RNA, 19 nt, Artificial Sequence
  Description of Artificial Sequence: Synthetic oligonucleotide
cgaggggguccccaggaag

SEQ ID NO: 4334 - RNA, 19 nt, Artificial Sequence
  Description of Artificial Sequence: Synthetic oligonucleotide
gcgaggggguccccaggaa

SEQ ID NO: 4335 - RNA, 19 nt, Artificial Sequence
  Description of Artificial Sequence: Synthetic oligonucleotide
ggcgaggggguccccagga

SEQ ID NO: 4336 - RNA, 19 nt, Artificial Sequence
  Description of Artificial Sequence: Synthetic oligonucleotide
cggcgaggggguccccagg

SEQ ID NO: 4337 - RNA, 19 nt, Artificial Sequence
  Description of Artificial Sequence: Synthetic oligonucleotide
ccggcgaggggguccccag

SEQ ID NO: 4338 - RNA, 19 nt, Artificial Sequence
  Description of Artificial Sequence: Synthetic oligonucleotide
cccggcgagggggucccca

SEQ ID NO: 4339 - RNA, 19 nt, Artificial Sequence
  Description of Artificial Sequence: Synthetic oligonucleotide
ucccggcgagggggucccc

SEQ ID NO: 4340 - RNA, 19 nt, Artificial Sequence
  Description of Artificial Sequence: Synthetic oligonucleotide
cucccggcgaggggguccc

SEQ ID NO: 4341 - RNA, 19 nt, Artificial Sequence
  Description of Artificial Sequence: Synthetic oligonucleotide
ucucccggcgagggggucc

SEQ ID NO: 4342 - RNA, 19 nt, Artificial Sequence
  Description of Artificial Sequence: Synthetic oligonucleotide
aucucccggcgaggggguc

SEQ ID NO: 4343 - RNA, 19 nt, Artificial Sequence
  Description of Artificial Sequence: Synthetic oligonucleotide
caucucccggcgagggggu

SEQ ID NO: 4344 - RNA, 19 nt, Artificial Sequence
  Description of Artificial Sequence: Synthetic oligonucleotide
ccaucucccggcgaggggg

SEQ ID NO: 4345 - RNA, 19 nt, Artificial Sequence
  Description of Artificial Sequence: Synthetic oligonucleotide
gccaucucccggcgagggg

SEQ ID NO: 4346 - RNA, 19 nt, Artificial Sequence
  Description of Artificial Sequence: Synthetic oligonucleotide
ggccaucucccggcgaggg

SEQ ID NO: 4347 - RNA, 19 nt, Artificial Sequence
  Description of Artificial Sequence: Synthetic oligonucleotide
cggccaucucccggcgagg

SEQ ID NO: 4348 - RNA, 19 nt, Artificial Sequence
  Description of Artificial Sequence: Synthetic oligonucleotide
gcggccaucucccggcgag

SEQ ID NO: 4349 - RNA, 19 nt, Artificial Sequence
  Description of Artificial Sequence: Synthetic oligonucleotide
cgcggccaucucccggcga

SEQ ID NO: 4350 - RNA, 19 nt, Artificial Sequence
  Description of Artificial Sequence: Synthetic oligonucleotide
acgcggccaucucccggcg

SEQ ID NO: 4351 - RNA, 19 nt, Artificial Sequence
  Description of Artificial Sequence: Synthetic oligonucleotide
aacgcggccaucucccggc

SEQ ID NO: 4352 - RNA, 19 nt, Artificial Sequence
  Description of Artificial Sequence: Synthetic oligonucleotide
caacgcggccaucucccgg

SEQ ID NO: 4353 - RNA, 19 nt, Artificial Sequence
  Description of Artificial Sequence: Synthetic oligonucleotide
ucaacgcggccaucucccg

SEQ ID NO: 4354 - RNA, 19 nt, Artificial Sequence
  Description of Artificial Sequence: Synthetic oligonucleotide
aucaacgcggccaucuccc

SEQ ID NO: 4355 - RNA, 19 nt, Artificial Sequence
  Description of Artificial Sequence: Synthetic oligonucleotide
caucaacgcggccaucucc

SEQ ID NO: 4356 - RNA, 19 nt, Artificial Sequence
  Description of Artificial Sequence: Synthetic oligonucleotide
gcaucaacgcggccaucuc

SEQ ID NO: 4357 - RNA, 19 nt, Artificial Sequence
  Description of Artificial Sequence: Synthetic oligonucleotide
cgcaucaacgcggccaucu

SEQ ID NO: 4358 - RNA, 19 nt, Artificial Sequence
  Description of Artificial Sequence: Synthetic oligonucleotide
ccgcaucaacgcggccauc

SEQ ID NO: 4359 - RNA, 19 nt, Artificial Sequence
  Description of Artificial Sequence: Synthetic oligonucleotide
uccgcaucaacgcggccau

SEQ ID NO: 4360 - RNA, 19 nt, Artificial Sequence
  Description of Artificial Sequence: Synthetic oligonucleotide
cuccgcaucaacgcggcca

SEQ ID NO: 4361 - RNA, 19 nt, Artificial Sequence
  Description of Artificial Sequence: Synthetic oligonucleotide
gcuccgcaucaacgcggcc

SEQ ID NO: 4362 - RNA, 19 nt, Artificial Sequence
  Description of Artificial Sequence: Synthetic oligonucleotide
ugcuccgcaucaacgcggc

SEQ ID NO: 4363 - RNA, 19 nt, Artificial Sequence
  Description of Artificial Sequence: Synthetic oligonucleotide
uugcuccgcaucaacgcgg

SEQ ID NO: 4364 - RNA, 19 nt, Artificial Sequence
  Description of Artificial Sequence: Synthetic oligonucleotide
cuugcuccgcaucaacgcg

SEQ ID NO: 4365 - RNA, 19 nt, Artificial Sequence
  Description of Artificial Sequence: Synthetic oligonucleotide
ccuugcuccgcaucaacgc

SEQ ID NO: 4366 - RNA, 19 nt, Artificial Sequence
  Description of Artificial Sequence: Synthetic oligonucleotide
uccuugcuccgcaucaacg

SEQ ID NO: 4367 - RNA, 19 nt, Artificial Sequence
  Description of Artificial Sequence: Synthetic oligonucleotide
auccuugcuccgcaucaac

SEQ ID NO: 4368 - RNA, 19 nt, Artificial Sequence
  Description of Artificial Sequence: Synthetic oligonucleotide
aauccuugcuccgcaucaa

SEQ ID NO: 4369 - RNA, 19 nt, Artificial Sequence
  Description of Artificial Sequence: Synthetic oligonucleotide
gaauccuugcuccgcauca

SEQ ID NO: 4370 - RNA, 19 nt, Artificial Sequence
  Description of Artificial Sequence: Synthetic oligonucleotide
cgaauccuugcuccgcauc

SEQ ID NO: 4371 - RNA, 19 nt, Artificial Sequence
  Description of Artificial Sequence: Synthetic oligonucleotide
acgaauccuugcuccgcau

SEQ ID NO: 4372 - RNA, 19 nt, Artificial Sequence
  Description of Artificial Sequence: Synthetic oligonucleotide
gacgaauccuugcuccgca

SEQ ID NO: 4373 - RNA, 19 nt, Artificial Sequence
  Description of Artificial Sequence: Synthetic oligonucleotide
ggacgaauccuugcuccgc

SEQ ID NO: 4374 - RNA, 19 nt, Artificial Sequence
  Description of Artificial Sequence: Synthetic oligonucleotide
aggacgaauccuugcuccg

SEQ ID NO: 4375 - RNA, 19 nt, Artificial Sequence
  Description of Artificial Sequence: Synthetic oligonucleotide
caggacgaauccuugcucc

SEQ ID NO: 4376 - RNA, 19 nt, Artificial Sequence
  Description of Artificial Sequence: Synthetic oligonucleotide
gcaggacgaauccuugcuc

SEQ ID NO: 4377 - RNA, 19 nt, Artificial Sequence
  Description of Artificial Sequence: Synthetic oligonucleotide
agcaggacgaauccuugcu

SEQ ID NO: 4378 - RNA, 19 nt, Artificial Sequence
  Description of Artificial Sequence: Synthetic oligonucleotide
cagcaggacgaauccuugc

SEQ ID NO: 4379 - RNA, 19 nt, Artificial Sequence
  Description of Artificial Sequence: Synthetic oligonucleotide
gcagcaggacgaauccuug

SEQ ID NO: 4380 - RNA, 19 nt, Artificial Sequence
  Description of Artificial Sequence: Synthetic oligonucleotide
ggcagcaggacgaauccuu

SEQ ID NO: 4381 - RNA, 19 nt, Artificial Sequence
  Description of Artificial Sequence: Synthetic oligonucleotide
aggcagcaggacgaauccu

SEQ ID NO: 4382 - RNA, 19 nt, Artificial Sequence
  Description of Artificial Sequence: Synthetic oligonucleotide
caggcagcaggacgaaucc

SEQ ID NO: 4383 - RNA, 19 nt, Artificial Sequence
  Description of Artificial Sequence: Synthetic oligonucleotide
gcaggcagcaggacgaauc

SEQ ID NO: 4384 - RNA, 19 nt, Artificial Sequence
  Description of Artificial Sequence: Synthetic oligonucleotide
agcaggcagcaggacgaau

SEQ ID NO: 4385 - RNA, 19 nt, Artificial Sequence
  Description of Artificial Sequence: Synthetic oligonucleotide
gagcaggcagcaggacgaa

SEQ ID NO: 4386 - RNA, 19 nt, Artificial Sequence
  Description of Artificial Sequence: Synthetic oligonucleotide
ggagcaggcagcaggacga

SEQ ID NO: 4387 - RNA, 19 nt, Artificial Sequence
  Description of Artificial Sequence: Synthetic oligonucleotide
aggagcaggcagcaggacg

SEQ ID NO: 4388 - RNA, 19 nt, Artificial Sequence
  Description of Artificial Sequence: Synthetic oligonucleotide
uaggagcaggcagcaggac

SEQ ID NO: 4389 - RNA, 19 nt, Artificial Sequence
  Description of Artificial Sequence: Synthetic oligonucleotide
guaggagcaggcagcagga

SEQ ID NO: 4390 - RNA, 19 nt, Artificial Sequence
  Description of Artificial Sequence: Synthetic oligonucleotide
aguaggagcaggcagcagg

SEQ ID NO: 4391 - RNA, 19 nt, Artificial Sequence
  Description of Artificial Sequence: Synthetic oligonucleotide
caguaggagcaggcagcag

SEQ ID NO: 4392 - RNA, 19 nt, Artificial Sequence
  Description of Artificial Sequence: Synthetic oligonucleotide
ccaguaggagcaggcagca

SEQ ID NO: 4393 - RNA, 19 nt, Artificial Sequence
  Description of Artificial Sequence: Synthetic oligonucleotide
gccaguaggagcaggcagc

SEQ ID NO: 4394 - RNA, 19 nt, Artificial Sequence
  Description of Artificial Sequence: Synthetic oligonucleotide
ggccaguaggagcaggcag

SEQ ID NO: 4395 - RNA, 19 nt, Artificial Sequence
  Description of Artificial Sequence: Synthetic oligonucleotide
cggccaguaggagcaggca

SEQ ID NO: 4396 - RNA, 19 nt, Artificial Sequence
  Description of Artificial Sequence: Synthetic oligonucleotide
gcggccaguaggagcaggc

SEQ ID NO: 4397 - RNA, 19 nt, Artificial Sequence
  Description of Artificial Sequence: Synthetic oligonucleotide
cgcggccaguaggagcagg

SEQ ID NO: 4398 - RNA, 19 nt, Artificial Sequence
  Description of Artificial Sequence: Synthetic oligonucleotide
ccgcggccaguaggagcag

SEQ ID NO: 4399 - RNA, 19 nt, Artificial Sequence
  Description of Artificial Sequence: Synthetic oligonucleotide
accgcggccaguaggagca

SEQ ID NO: 4400 - RNA, 19 nt, Artificial Sequence
  Description of Artificial Sequence: Synthetic oligonucleotide
caccgcggccaguaggagc

SEQ ID NO: 4401 - RNA, 19 nt, Artificial Sequence
  Description of Artificial Sequence: Synthetic oligonucleotide
gcaccgcggccaguaggag

SEQ ID NO: 4402 - RNA, 19 nt, Artificial Sequence
  Description of Artificial Sequence: Synthetic oligonucleotide
agcaccgcggccaguagga

SEQ ID NO: 4403 - RNA, 19 nt, Artificial Sequence
  Description of Artificial Sequence: Synthetic oligonucleotide
cagcaccgcggccaguagg

SEQ ID NO: 4404 - RNA, 19 nt, Artificial Sequence
  Description of Artificial Sequence: Synthetic oligonucleotide
ucagcaccgcggccaguag

SEQ ID NO: 4405 - RNA, 19 nt, Artificial Sequence
  Description of Artificial Sequence: Synthetic oligonucleotide
aucagcaccgcggccagua

SEQ ID NO: 4406 - RNA, 19 nt, Artificial Sequence
  Description of Artificial Sequence: Synthetic oligonucleotide
caucagcaccgcggccagu

SEQ ID NO: 4407 - RNA, 19 nt, Artificial Sequence
  Description of Artificial Sequence: Synthetic oligonucleotide
ccaucagcaccgcggccag

SEQ ID NO: 4408 - RNA, 19 nt, Artificial Sequence
  Description of Artificial Sequence: Synthetic oligonucleotide
accaucagcaccgcggcca

SEQ ID NO: 4409 - RNA, 19 nt, Artificial Sequence
  Description of Artificial Sequence: Synthetic oligonucleotide
caccaucagcaccgcggcc

SEQ ID NO: 4410 - RNA, 19 nt, Artificial Sequence
  Description of Artificial Sequence: Synthetic oligonucleotide
ccaccaucagcaccgcggc

SEQ ID NO: 4411 - RNA, 19 nt, Artificial Sequence
  Description of Artificial Sequence: Synthetic oligonucleotide
uccaccaucagcaccgcgg

SEQ ID NO: 4412 - RNA, 19 nt, Artificial Sequence
  Description of Artificial Sequence: Synthetic oligonucleotide
cuccaccaucagcaccgcg

SEQ ID NO: 4413 - RNA, 19 nt, Artificial Sequence
  Description of Artificial Sequence: Synthetic oligonucleotide
ucuccaccaucagcaccgc

SEQ ID NO: 4414 - RNA, 19 nt, Artificial Sequence
  Description of Artificial Sequence: Synthetic oligonucleotide
cucuccaccaucagcaccg

SEQ ID NO: 4415 - RNA, 19 nt, Artificial Sequence
  Description of Artificial Sequence: Synthetic oligonucleotide
gcucuccaccaucagcacc

SEQ ID NO: 4416 - RNA, 19 nt, Artificial Sequence
  Description of Artificial Sequence: Synthetic oligonucleotide
agcucuccaccaucagcac

SEQ ID NO: 4417 - RNA, 19 nt, Artificial Sequence
  Description of Artificial Sequence: Synthetic oligonucleotide
gagcucuccaccaucagca

SEQ ID NO: 4418 - RNA, 19 nt, Artificial Sequence
  Description of Artificial Sequence: Synthetic oligonucleotide
ugagcucuccaccaucagc

SEQ ID NO: 4419 - RNA, 19 nt, Artificial Sequence
  Description of Artificial Sequence: Synthetic oligonucleotide
gugagcucuccaccaucag

SEQ ID NO: 4420 - RNA, 19 nt, Artificial Sequence
  Description of Artificial Sequence: Synthetic oligonucleotide
ugugagcucuccaccauca

SEQ ID NO: 4421 - RNA, 19 nt, Artificial Sequence
  Description of Artificial Sequence: Synthetic oligonucleotide
cugugagcucuccaccauc

SEQ ID NO: 4422 - RNA, 19 nt, Artificial Sequence
  Description of Artificial Sequence: Synthetic oligonucleotide
ucugugagcucuccaccau

SEQ ID NO: 4423 - RNA, 19 nt, Artificial Sequence
  Description of Artificial Sequence: Synthetic oligonucleotide
aucugugagcucuccacca

SEQ ID NO: 4424 - RNA, 19 nt, Artificial Sequence
  Description of Artificial Sequence: Synthetic oligonucleotide
gaucugugagcucuccacc

SEQ ID NO: 4425 - RNA, 19 nt, Artificial Sequence
  Description of Artificial Sequence: Synthetic oligonucleotide
cgaucugugagcucuccac

SEQ ID NO: 4426 - RNA, 19 nt, Artificial Sequence
  Description of Artificial Sequence: Synthetic oligonucleotide
ccgaucugugagcucucca

SEQ ID NO: 4427 - RNA, 19 nt, Artificial Sequence
  Description of Artificial Sequence: Synthetic oligonucleotide
gccgaucugugagcucucc

SEQ ID NO: 4428 - RNA, 19 nt, Artificial Sequence
  Description of Artificial Sequence: Synthetic oligonucleotide
ugccgaucugugagcucuc

SEQ ID NO: 4429 - RNA, 19 nt, Artificial Sequence
  Description of Artificial Sequence: Synthetic oligonucleotide
cugccgaucugugagcucu

SEQ ID NO: 4430 - RNA, 19 nt, Artificial Sequence
  Description of Artificial Sequence: Synthetic oligonucleotide
acugccgaucugugagcuc

SEQ ID NO: 4431 - RNA, 19 nt, Artificial Sequence
  Description of Artificial Sequence: Synthetic oligonucleotide
aacugccgaucugugagcu

SEQ ID NO: 4432 - RNA, 19 nt, Artificial Sequence
  Description of Artificial Sequence: Synthetic oligonucleotide
gaacugccgaucugugagc

SEQ ID NO: 4433 - RNA, 19 nt, Artificial Sequence
  Description of Artificial Sequence: Synthetic oligonucleotide
cgaacugccgaucugugag

SEQ ID NO: 4434 - RNA, 19 nt, Artificial Sequence
  Description of Artificial Sequence: Synthetic oligonucleotide
gcgaacugccgaucuguga

SEQ ID NO: 4435 - RNA, 19 nt, Artificial Sequence
  Description of Artificial Sequence: Synthetic oligonucleotide
cgcgaacugccgaucugug

SEQ ID NO: 4436 - RNA, 19 nt, Artificial Sequence
  Description of Artificial Sequence: Synthetic oligonucleotide
ccgcgaacugccgaucugu

SEQ ID NO: 4437 - RNA, 19 nt, Artificial Sequence
  Description of Artificial Sequence: Synthetic oligonucleotide
cccgcgaacugccgaucug

SEQ ID NO: 4438 - RNA, 19 nt, Artificial Sequence
  Description of Artificial Sequence: Synthetic oligonucleotide
gcccgcgaacugccgaucu

SEQ ID NO: 4439 - RNA, 19 nt, Artificial Sequence
  Description of Artificial Sequence: Synthetic oligonucleotide
ggcccgcgaacugccgauc

SEQ ID NO: 4440 - RNA, 19 nt, Artificial Sequence
  Description of Artificial Sequence: Synthetic oligonucleotide
uggcccgcgaacugccgau

SEQ ID NO: 4441 - RNA, 19 nt, Artificial Sequence
  Description of Artificial Sequence: Synthetic oligonucleotide
uuggcccgcgaacugccga

SEQ ID NO: 4442 - RNA, 19 nt, Artificial Sequence
  Description of Artificial Sequence: Synthetic oligonucleotide
uuuggcccgcgaacugccg

SEQ ID NO: 4443 - RNA, 19 nt, Artificial Sequence
  Description of Artificial Sequence: Synthetic oligonucleotide
guuuggcccgcgaacugcc

SEQ ID NO: 4444 - RNA, 19 nt, Artificial Sequence
  Description of Artificial Sequence: Synthetic oligonucleotide
aguuuggcccgcgaacugc

SEQ ID NO: 4445 - RNA, 19 nt, Artificial Sequence
  Description of Artificial Sequence: Synthetic oligonucleotide
gaguuuggcccgcgaacug

SEQ ID NO: 4446 - RNA, 19 nt, Artificial Sequence
  Description of Artificial Sequence: Synthetic oligonucleotide
ugaguuuggcccgcgaacu

SEQ ID NO: 4447 - RNA, 19 nt, Artificial Sequence
  Description of Artificial Sequence: Synthetic oligonucleotide
uugaguuuggcccgcgaac

SEQ ID NO: 4448 - RNA, 19 nt, Artificial Sequence
  Description of Artificial Sequence: Synthetic oligonucleotide
guugaguuuggcccgcgaa

SEQ ID NO: 4449 - RNA, 19 nt, Artificial Sequence
  Description of Artificial Sequence: Synthetic oligonucleotide
aguugaguuuggcccgcga

SEQ ID NO: 4450 - RNA, 19 nt, Artificial Sequence
  Description of Artificial Sequence: Synthetic oligonucleotide
gaguugaguuuggcccgcg

SEQ ID NO: 4451 - RNA, 19 nt, Artificial Sequence
  Description of Artificial Sequence: Synthetic oligonucleotide
ggaguugaguuuggcccgc

SEQ ID NO: 4452 - RNA, 19 nt, Artificial Sequence
  Description of Artificial Sequence: Synthetic oligonucleotide
uggaguugaguuuggcccg

SEQ ID NO: 4453 - RNA, 19 nt, Artificial Sequence
  Description of Artificial Sequence: Synthetic oligonucleotide
auggaguugaguuuggccc

SEQ ID NO: 4454 - RNA, 19 nt, Artificial Sequence
  Description of Artificial Sequence: Synthetic oligonucleotide
gauggaguugaguuuggcc

SEQ ID NO: 4455 - RNA, 19 nt, Artificial Sequence
  Description of Artificial Sequence: Synthetic oligonucleotide
ugauggaguugaguuuggc

SEQ ID NO: 4456 - RNA, 19 nt, Artificial Sequence
  Description of Artificial Sequence: Synthetic oligonucleotide
uugauggaguugaguuugg

SEQ ID NO: 4457 - RNA, 19 nt, Artificial Sequence
  Description of Artificial Sequence: Synthetic oligonucleotide
cuugauggaguugaguuug

SEQ ID NO: 4458 - RNA, 19 nt, Artificial Sequence
  Description of Artificial Sequence: Synthetic oligonucleotide
acuugauggaguugaguuu

SEQ ID NO: 4459 - RNA, 19 nt, Artificial Sequence
  Description of Artificial Sequence: Synthetic oligonucleotide
gacuugauggaguugaguu

SEQ ID NO: 4460 - RNA, 19 nt, Artificial Sequence
  Description of Artificial Sequence: Synthetic oligonucleotide
ggacuugauggaguugagu

SEQ ID NO: 4461 - RNA, 19 nt, Artificial Sequence
  Description of Artificial Sequence: Synthetic oligonucleotide
aggacuugauggaguugag

SEQ ID NO: 4462 - RNA, 19 nt, Artificial Sequence
  Description of Artificial Sequence: Synthetic oligonucleotide
gaggacuugauggaguuga

SEQ ID NO: 4463 - RNA, 19 nt, Artificial Sequence
  Description of Artificial Sequence: Synthetic oligonucleotide
agaggacuugauggaguug

SEQ ID NO: 4464 - RNA, 19 nt, Artificial Sequence
  Description of Artificial Sequence: Synthetic oligonucleotide
gagaggacuugauggaguu

SEQ ID NO: 4465 - RNA, 19 nt, Artificial Sequence
  Description of Artificial Sequence: Synthetic oligonucleotide
agagaggacuugauggagu

SEQ ID NO: 4466 - RNA, 19 nt, Artificial Sequence
  Description of Artificial Sequence: Synthetic oligonucleotide
cagagaggacuugauggag

SEQ ID NO: 4467 - RNA, 19 nt, Artificial Sequence
  Description of Artificial Sequence: Synthetic oligonucleotide
ccagagaggacuugaugga

SEQ ID NO: 4468 - RNA, 19 nt, Artificial Sequence
  Description of Artificial Sequence: Synthetic oligonucleotide
cccagagaggacuugaugg

SEQ ID NO: 4469 - RNA, 19 nt, Artificial Sequence
  Description of Artificial Sequence: Synthetic oligonucleotide
gcccagagaggacuugaug

SEQ ID NO: 4470 - RNA, 19 nt, Artificial Sequence
  Description of Artificial Sequence: Synthetic oligonucleotide
cgcccagagaggacuugau

SEQ ID NO: 4471 - RNA, 19 nt, Artificial Sequence
  Description of Artificial Sequence: Synthetic oligonucleotide
ccgcccagagaggacuuga

SEQ ID NO: 4472 - RNA, 19 nt, Artificial Sequence
  Description of Artificial Sequence: Synthetic oligonucleotide
cccgcccagagaggacuug

SEQ ID NO: 4473 - RNA, 19 nt, Artificial Sequence
  Description of Artificial Sequence: Synthetic oligonucleotide
ccccgcccagagaggacuu

SEQ ID NO: 4474 - RNA, 19 nt, Artificial Sequence
  Description of Artificial Sequence: Synthetic oligonucleotide
uccccgcccagagaggacu

SEQ ID NO: 4475 - RNA, 19 nt, Artificial Sequence
  Description of Artificial Sequence: Synthetic oligonucleotide
cuccccgcccagagaggac

SEQ ID NO: 4476 - RNA, 19 nt, Artificial Sequence
  Description of Artificial Sequence: Synthetic oligonucleotide
ucuccccgcccagagagga

SEQ ID NO: 4477 - RNA, 19 nt, Artificial Sequence
  Description of Artificial Sequence: Synthetic oligonucleotide
gucuccccgcccagagagg

SEQ ID NO: 4478 - RNA, 19 nt, Artificial Sequence
  Description of Artificial Sequence: Synthetic oligonucleotide
cgucuccccgcccagagag

SEQ ID NO: 4479 - RNA, 19 nt, Artificial Sequence
  Description of Artificial Sequence: Synthetic oligonucleotide
gcgucuccccgcccagaga

SEQ ID NO: 4480 - RNA, 19 nt, Artificial Sequence
  Description of Artificial Sequence: Synthetic oligonucleotide
ggcgucuccccgcccagag

SEQ ID NO: 4481 - RNA, 19 nt, Artificial Sequence
  Description of Artificial Sequence: Synthetic oligonucleotide
aggcgucuccccgcccaga

SEQ ID NO: 4482 - RNA, 19 nt, Artificial Sequence
  Description of Artificial Sequence: Synthetic oligonucleotide
caggcgucuccccgcccag

SEQ ID NO: 4483 - RNA, 19 nt, Artificial Sequence
  Description of Artificial Sequence: Synthetic oligonucleotide
ccaggcgucuccccgccca

SEQ ID NO: 4484 - RNA, 19 nt, Artificial Sequence
  Description of Artificial Sequence: Synthetic oligonucleotide
accaggcgucuccccgccc

SEQ ID NO: 4485 - RNA, 19 nt, Artificial Sequence
  Description of Artificial Sequence: Synthetic oligonucleotide
gaccaggcgucuccccgcc

SEQ ID NO: 4486 - RNA, 19 nt, Artificial Sequence
  Description of Artificial Sequence: Synthetic oligonucleotide
ugaccaggcgucuccccgc

SEQ ID NO: 4487 - RNA, 19 nt, Artificial Sequence
  Description of Artificial Sequence: Synthetic oligonucleotide
cugaccaggcgucuccccg

SEQ ID NO: 4488 - RNA, 19 nt, Artificial Sequence
  Description of Artificial Sequence: Synthetic oligonucleotide
ccugaccaggcgucucccc

SEQ ID NO: 4489 - RNA, 19 nt, Artificial Sequence
  Description of Artificial Sequence: Synthetic oligonucleotide
gccugaccaggcgucuccc

SEQ ID NO: 4490 - RNA, 19 nt, Artificial Sequence
  Description of Artificial Sequence: Synthetic oligonucleotide
ggccugaccaggcgucucc

SEQ ID NO: 4491 - RNA, 19 nt, Artificial Sequence
  Description of Artificial Sequence: Synthetic oligonucleotide
cggccugaccaggcgucuc

SEQ ID NO: 4492 - RNA, 19 nt, Artificial Sequence
  Description of Artificial Sequence: Synthetic oligonucleotide
gcggccugaccaggcgucu

SEQ ID NO: 4493 - RNA, 19 nt, Artificial Sequence
  Description of Artificial Sequence: Synthetic oligonucleotide
ggcggccugaccaggcguc

SEQ ID NO: 4494 - RNA, 19 nt, Artificial Sequence
  Description of Artificial Sequence: Synthetic oligonucleotide
uggcggccugaccaggcgu

SEQ ID NO: 4495 - RNA, 19 nt, Artificial Sequence
  Description of Artificial Sequence: Synthetic oligonucleotide
uuggcggccugaccaggcg

SEQ ID NO: 4496 - RNA, 19 nt, Artificial Sequence
  Description of Artificial Sequence: Synthetic oligonucleotide
auuggcggccugaccaggc

SEQ ID NO: 4497 - RNA, 19 nt, Artificial Sequence
  Description of Artificial Sequence: Synthetic oligonucleotide
gauuggcggccugaccagg

SEQ ID NO: 4498 - RNA, 19 nt, Artificial Sequence
  Description of Artificial Sequence: Synthetic oligonucleotide
cgauuggcggccugaccag

SEQ ID NO: 4499 - RNA, 19 nt, Artificial Sequence
  Description of Artificial Sequence: Synthetic oligonucleotide
ucgauuggcggccugacca

SEQ ID NO: 4500 - RNA, 19 nt, Artificial Sequence
  Description of Artificial Sequence: Synthetic oligonucleotide
aucgauuggcggccugacc

SEQ ID NO: 4501 - RNA, 19 nt, Artificial Sequence
  Description of Artificial Sequence: Synthetic oligonucleotide
gaucgauuggcggccugac

SEQ ID NO: 4502 - RNA, 19 nt, Artificial Sequence
  Description of Artificial Sequence: Synthetic oligonucleotide
agaucgauuggcggccuga

SEQ ID NO: 4503 - RNA, 19 nt, Artificial Sequence
  Description of Artificial Sequence: Synthetic oligonucleotide
cagaucgauuggcggccug

SEQ ID NO: 4504 - RNA, 19 nt, Artificial Sequence
  Description of Artificial Sequence: Synthetic oligonucleotide
gcagaucgauuggcggccu

SEQ ID NO: 4505 - RNA, 19 nt, Artificial Sequence
  Description of Artificial Sequence: Synthetic oligonucleotide
cgcagaucgauuggcggcc

SEQ ID NO: 4506 - RNA, 19 nt, Artificial Sequence
  Description of Artificial Sequence: Synthetic oligonucleotide
ccgcagaucgauuggcggc

SEQ ID NO: 4507 - RNA, 19 nt, Artificial Sequence
  Description of Artificial Sequence: Synthetic oligonucleotide
cccgcagaucgauuggcgg

SEQ ID NO: 4508 - RNA, 19 nt, Artificial Sequence
  Description of Artificial Sequence: Synthetic oligonucleotide
gcccgcagaucgauuggcg

SEQ ID NO: 4509 - RNA, 19 nt, Artificial Sequence
  Description of Artificial Sequence: Synthetic oligonucleotide
ugcccgcagaucgauuggc

SEQ ID NO: 4510 - RNA, 19 nt, Artificial Sequence
  Description of Artificial Sequence: Synthetic oligonucleotide
augcccgcagaucgauugg

SEQ ID NO: 4511 - RNA, 19 nt, Artificial Sequence
  Description of Artificial Sequence: Synthetic oligonucleotide
caugcccgcagaucgauug

SEQ ID NO: 4512 - RNA, 19 nt, Artificial Sequence
  Description of Artificial Sequence: Synthetic oligonucleotide
acaugcccgcagaucgauu

SEQ ID NO: 4513 - RNA, 19 nt, Artificial Sequence
  Description of Artificial Sequence: Synthetic oligonucleotide
uacaugcccgcagaucgau

SEQ ID NO: 4514 - RNA, 19 nt, Artificial Sequence
  Description of Artificial Sequence: Synthetic oligonucleotide
guacaugcccgcagaucga

SEQ ID NO: 4515 - RNA, 19 nt, Artificial Sequence
  Description of Artificial Sequence: Synthetic oligonucleotide
gguacaugcccgcagaucg

SEQ ID NO: 4516 - RNA, 19 nt, Artificial Sequence
  Description of Artificial Sequence: Synthetic oligonucleotide
ugguacaugcccgcagauc

SEQ ID NO: 4517 - RNA, 19 nt, Artificial Sequence
  Description of Artificial Sequence: Synthetic oligonucleotide
uugguacaugcccgcagau

SEQ ID NO: 4518 - RNA, 19 nt, Artificial Sequence
  Description of Artificial Sequence: Synthetic oligonucleotide
cuugguacaugcccgcaga

SEQ ID NO: 4519 - RNA, 19 nt, Artificial Sequence
  Description of Artificial Sequence: Synthetic oligonucleotide
ccuugguacaugcccgcag

SEQ ID NO: 4520 - RNA, 19 nt, Artificial Sequence
  Description of Artificial Sequence: Synthetic oligonucleotide
uccuugguacaugcccgca

SEQ ID NO: 4521 - RNA, 19 nt, Artificial Sequence
  Description of Artificial Sequence: Synthetic oligonucleotide
guccuugguacaugcccgc

SEQ ID NO: 4522 - RNA, 19 nt, Artificial Sequence
  Description of Artificial Sequence: Synthetic oligonucleotide
aguccuugguacaugcccg

SEQ ID NO: 4523 - RNA, 19 nt, Artificial Sequence
  Description of Artificial Sequence: Synthetic oligonucleotide
caguccuugguacaugccc

SEQ ID NO: 4524 - RNA, 19 nt, Artificial Sequence
  Description of Artificial Sequence: Synthetic oligonucleotide
ccaguccuugguacaugcc

SEQ ID NO: 4525 - RNA, 19 nt, Artificial Sequence
  Description of Artificial Sequence: Synthetic oligonucleotide
gccaguccuugguacaugc

SEQ ID NO: 4526 - RNA, 19 nt, Artificial Sequence
  Description of Artificial Sequence: Synthetic oligonucleotide
ugccaguccuugguacaug

SEQ ID NO: 4527 - RNA, 19 nt, Artificial Sequence
  Description of Artificial Sequence: Synthetic oligonucleotide
augccaguccuugguacau

SEQ ID NO: 4528 - RNA, 19 nt, Artificial Sequence
  Description of Artificial Sequence: Synthetic oligonucleotide
aaugccaguccuugguaca

SEQ ID NO: 4529 - RNA, 19 nt, Artificial Sequence
  Description of Artificial Sequence: Synthetic oligonucleotide
gaaugccaguccuugguac

SEQ ID NO: 4530 - RNA, 19 nt, Artificial Sequence
  Description of Artificial Sequence: Synthetic oligonucleotide
cgaaugccaguccuuggua

SEQ ID NO: 4531 - RNA, 19 nt, Artificial Sequence
  Description of Artificial Sequence: Synthetic oligonucleotide
ccgaaugccaguccuuggu

SEQ ID NO: 4532 - RNA, 19 nt, Artificial Sequence
  Description of Artificial Sequence: Synthetic oligonucleotide
gccgaaugccaguccuugg

SEQ ID NO: 4533 - RNA, 19 nt, Artificial Sequence
  Description of Artificial Sequence: Synthetic oligonucleotide
cgccgaaugccaguccuug

SEQ ID NO: 4534 - RNA, 19 nt, Artificial Sequence
  Description of Artificial Sequence: Synthetic oligonucleotide
ccgccgaaugccaguccuu

SEQ ID NO: 4535 - RNA, 19 nt, Artificial Sequence
  Description of Artificial Sequence: Synthetic oligonucleotide
gccgccgaaugccaguccu

SEQ ID NO: 4536 - RNA, 19 nt, Artificial Sequence
  Description of Artificial Sequence: Synthetic oligonucleotide
ugccgccgaaugccagucc

SEQ ID NO: 4537 - RNA, 19 nt, Artificial Sequence
  Description of Artificial Sequence: Synthetic oligonucleotide
cugccgccgaaugccaguc

SEQ ID NO: 4538 - RNA, 19 nt, Artificial Sequence
  Description of Artificial Sequence: Synthetic oligonucleotide
acugccgccgaaugccagu

SEQ ID NO: 4539 - RNA, 19 nt, Artificial Sequence
  Description of Artificial Sequence: Synthetic oligonucleotide
uacugccgccgaaugccag

SEQ ID NO: 4540 - RNA, 19 nt, Artificial Sequence
  Description of Artificial Sequence: Synthetic oligonucleotide
uuacugccgccgaaugcca

SEQ ID NO: 4541 - RNA, 19 nt, Artificial Sequence
  Description of Artificial Sequence: Synthetic oligonucleotide
cuuacugccgccgaaugcc

SEQ ID NO: 4542 - RNA, 19 nt, Artificial Sequence
  Description of Artificial Sequence: Synthetic oligonucleotide
ucuuacugccgccgaaugc

SEQ ID NO: 4543 - RNA, 19 nt, Artificial Sequence
  Description of Artificial Sequence: Synthetic oligonucleotide
uucuuacugccgccgaaug

SEQ ID NO: 4544 - RNA, 19 nt, Artificial Sequence
  Description of Artificial Sequence: Synthetic oligonucleotide
cuucuuacugccgccgaau

SEQ ID NO: 4545 - RNA, 19 nt, Artificial Sequence
  Description of Artificial Sequence: Synthetic oligonucleotide
ccuucuuacugccgccgaa

SEQ ID NO: 4546 - RNA, 19 nt, Artificial Sequence
  Description of Artificial Sequence: Synthetic oligonucleotide
cccuucuuacugccgccga

SEQ ID NO: 4547 - RNA, 19 nt, Artificial Sequence
  Description of Artificial Sequence: Synthetic oligonucleotide
gcccuucuuacugccgccg

SEQ ID NO: 4548 - RNA, 19 nt, Artificial Sequence
  Description of Artificial Sequence: Synthetic oligonucleotide
ugcccuucuuacugccgcc

SEQ ID NO: 4549 - RNA, 19 nt, Artificial Sequence
  Description of Artificial Sequence: Synthetic oligonucleotide
uugcccuucuuacugccgc

SEQ ID NO: 4550 - RNA, 19 nt, Artificial Sequence
  Description of Artificial Sequence: Synthetic oligonucleotide
uuugcccuucuuacugccg

SEQ ID NO: 4551 - RNA, 19 nt, Artificial Sequence
  Description of Artificial Sequence: Synthetic oligonucleotide
uuuugcccuucuuacugcc

SEQ ID NO: 4552 - RNA, 19 nt, Artificial Sequence
  Description of Artificial Sequence: Synthetic oligonucleotide
uuuuugcccuucuuacugc

SEQ ID NO: 4553 - RNA, 19 nt, Artificial Sequence
  Description of Artificial Sequence: Synthetic oligonucleotide
guuuuugcccuucuuacug

SEQ ID NO: 4554 - RNA, 19 nt, Artificial Sequence
  Description of Artificial Sequence: Synthetic oligonucleotide
gguuuuugcccuucuuacu

SEQ ID NO: 4555 - RNA, 19 nt, Artificial Sequence
  Description of Artificial Sequence: Synthetic oligonucleotide
agguuuuugcccuucuuac

SEQ ID NO: 4556 - RNA, 19 nt, Artificial Sequence
  Description of Artificial Sequence: Synthetic oligonucleotide
cagguuuuugcccuucuua

SEQ ID NO: 4557 - RNA, 19 nt, Artificial Sequence
  Description of Artificial Sequence: Synthetic oligonucleotide
ccagguuuuugcccuucuu

SEQ ID NO: 4558 - RNA, 19 nt, Artificial Sequence
  Description of Artificial Sequence: Synthetic oligonucleotide
cccagguuuuugcccuucu

SEQ ID NO: 4559 - RNA, 19 nt, Artificial Sequence
  Description of Artificial Sequence: Synthetic oligonucleotide
ccccagguuuuugcccuuc

SEQ ID NO: 4560 - RNA, 19 nt, Artificial Sequence
  Description of Artificial Sequence: Synthetic oligonucleotide
gccccagguuuuugcccuu

SEQ ID NO: 4561 - RNA, 19 nt, Artificial Sequence
  Description of Artificial Sequence: Synthetic oligonucleotide
ugccccagguuuuugcccu

SEQ ID NO: 4562 - RNA, 19 nt, Artificial Sequence
  Description of Artificial Sequence: Synthetic oligonucleotide
cugccccagguuuuugccc

SEQ ID NO: 4563 - RNA, 19 nt, Artificial Sequence
  Description of Artificial Sequence: Synthetic oligonucleotide
ccugccccagguuuuugcc

SEQ ID NO: 4564 - RNA, 19 nt, Artificial Sequence
  Description of Artificial Sequence: Synthetic oligonucleotide
gccugccccagguuuuugc

SEQ ID NO: 4565 - RNA, 19 nt, Artificial Sequence
  Description of Artificial Sequence: Synthetic oligonucleotide
ggccugccccagguuuuug

SEQ ID NO: 4566 - RNA, 19 nt, Artificial Sequence
  Description of Artificial Sequence: Synthetic oligonucleotide
aggccugccccagguuuuu

SEQ ID NO: 4567 - RNA, 19 nt, Artificial Sequence
  Description of Artificial Sequence: Synthetic oligonucleotide
uaggccugccccagguuuu

SEQ ID NO: 4568 - RNA, 19 nt, Artificial Sequence
  Description of Artificial Sequence: Synthetic oligonucleotide
guaggccugccccagguuu

SEQ ID NO: 4569 - RNA, 19 nt, Artificial Sequence
  Description of Artificial Sequence: Synthetic oligonucleotide
gguaggccugccccagguu

SEQ ID NO: 4570 - RNA, 19 nt, Artificial Sequence
  Description of Artificial Sequence: Synthetic oligonucleotide
ggguaggccugccccaggu

SEQ ID NO: 4571 - RNA, 19 nt, Artificial Sequence
  Description of Artificial Sequence: Synthetic oligonucleotide
aggguaggccugccccagg

SEQ ID NO: 4572 - RNA, 19 nt, Artificial Sequence
  Description of Artificial Sequence: Synthetic oligonucleotide
aaggguaggccugccccag

SEQ ID NO: 4573 - RNA, 19 nt, Artificial Sequence
  Description of Artificial Sequence: Synthetic oligonucleotide
caaggguaggccugcccca

SEQ ID NO: 4574 - RNA, 19 nt, Artificial Sequence
  Description of Artificial Sequence: Synthetic oligonucleotide
acaaggguaggccugcccc

SEQ ID NO: 4575 - RNA, 19 nt, Artificial Sequence
  Description of Artificial Sequence: Synthetic oligonucleotide
uacaaggguaggccugccc

SEQ ID NO: 4576 - RNA, 19 nt, Artificial Sequence
  Description of Artificial Sequence: Synthetic oligonucleotide
cuacaaggguaggccugcc

SEQ ID NO: 4577 - RNA, 19 nt, Artificial Sequence
  Description of Artificial Sequence: Synthetic oligonucleotide
gcuacaaggguaggccugc

SEQ ID NO: 4578 - RNA, 19 nt, Artificial Sequence
  Description of Artificial Sequence: Synthetic oligonucleotide
ugcuacaaggguaggccug

SEQ ID NO: 4579 - RNA, 19 nt, Artificial Sequence
  Description of Artificial Sequence: Synthetic oligonucleotide
cugcuacaaggguaggccu

SEQ ID NO: 4580 - RNA, 19 nt, Artificial Sequence
  Description of Artificial Sequence: Synthetic oligonucleotide
acugcuacaaggguaggcc

SEQ ID NO: 4581 - RNA, 19 nt, Artificial Sequence
  Description of Artificial Sequence: Synthetic oligonucleotide
cacugcuacaaggguaggc

SEQ ID NO: 4582 - RNA, 19 nt, Artificial Sequence
  Description of Artificial Sequence: Synthetic oligonucleotide
ucacugcuacaaggguagg

SEQ ID NO: 4583 - RNA, 19 nt, Artificial Sequence
  Description of Artificial Sequence: Synthetic oligonucleotide
aucacugcuacaaggguag

SEQ ID NO: 4584 - RNA, 19 nt, Artificial Sequence
  Description of Artificial Sequence: Synthetic oligonucleotide
uaucacugcuacaagggua

SEQ ID NO: 4585 - RNA, 19 nt, Artificial Sequence
  Description of Artificial Sequence: Synthetic oligonucleotide
uuaucacugcuacaagggu

SEQ ID NO: 4586 - RNA, 19 nt, Artificial Sequence
  Description of Artificial Sequence: Synthetic oligonucleotide
cuuaucacugcuacaaggg

SEQ ID NO: 4587 - RNA, 19 nt, Artificial Sequence
  Description of Artificial Sequence: Synthetic oligonucleotide
ccuuaucacugcuacaagg

SEQ ID NO: 4588 - RNA, 19 nt, Artificial Sequence
  Description of Artificial Sequence: Synthetic oligonucleotide
uccuuaucacugcuacaag

SEQ ID NO: 4589 - RNA, 19 nt, Artificial Sequence
  Description of Artificial Sequence: Synthetic oligonucleotide
cuccuuaucacugcuacaa

SEQ ID NO: 4590 - RNA, 19 nt, Artificial Sequence
  Description of Artificial Sequence: Synthetic oligonucleotide
acuccuuaucacugcuaca

SEQ ID NO: 4591 - RNA, 19 nt, Artificial Sequence
  Description of Artificial Sequence: Synthetic oligonucleotide
cacuccuuaucacugcuac

SEQ ID NO: 4592 - RNA, 19 nt, Artificial Sequence
  Description of Artificial Sequence: Synthetic oligonucleotide
acacuccuuaucacugcua

SEQ ID NO: 4593 - RNA, 19 nt, Artificial Sequence
  Description of Artificial Sequence: Synthetic oligonucleotide
cacacuccuuaucacugcu

SEQ ID NO: 4594 - RNA, 19 nt, Artificial Sequence
  Description of Artificial Sequence: Synthetic oligonucleotide
ucacacuccuuaucacugc

SEQ ID NO: 4595 - RNA, 19 nt, Artificial Sequence
  Description of Artificial Sequence: Synthetic oligonucleotide
uucacacuccuuaucacug

SEQ ID NO: 4596 - RNA, 19 nt, Artificial Sequence
  Description of Artificial Sequence: Synthetic oligonucleotide
cuucacacuccuuaucacu

SEQ ID NO: 4597 - RNA, 19 nt, Artificial Sequence
  Description of Artificial Sequence: Synthetic oligonucleotide
acuucacacuccuuaucac

SEQ ID NO: 4598 - RNA, 19 nt, Artificial Sequence
  Description of Artificial Sequence: Synthetic oligonucleotide
aacuucacacuccuuauca

SEQ ID NO: 4599 - RNA, 19 nt, Artificial Sequence
  Description of Artificial Sequence: Synthetic oligonucleotide
caacuucacacuccuuauc

SEQ ID NO: 4600 - RNA, 19 nt, Artificial Sequence
  Description of Artificial Sequence: Synthetic oligonucleotide
ccaacuucacacuccuuau

SEQ ID NO: 4601 - RNA, 19 nt, Artificial Sequence
  Description of Artificial Sequence: Synthetic oligonucleotide
cccaacuucacacuccuua

SEQ ID NO: 4602 - RNA, 19 nt, Artificial Sequence
  Description of Artificial Sequence: Synthetic oligonucleotide
ucccaacuucacacuccuu

SEQ ID NO: 4603 - RNA, 19 nt, Artificial Sequence
  Description of Artificial Sequence: Synthetic oligonucleotide
cucccaacuucacacuccu

SEQ ID NO: 4604 - RNA, 19 nt, Artificial Sequence
  Description of Artificial Sequence: Synthetic oligonucleotide
ccucccaacuucacacucc

SEQ ID NO: 4605 - RNA, 19 nt, Artificial Sequence
  Description of Artificial Sequence: Synthetic oligonucleotide
accucccaacuucacacuc

SEQ ID NO: 4606 - RNA, 19 nt, Artificial Sequence
  Description of Artificial Sequence: Synthetic oligonucleotide
uaccucccaacuucacacu

SEQ ID NO: 4607 - RNA, 19 nt, Artificial Sequence
  Description of Artificial Sequence: Synthetic oligonucleotide
auaccucccaacuucacac

SEQ ID NO: 4608 - RNA, 19 nt, Artificial Sequence
  Description of Artificial Sequence: Synthetic oligonucleotide
aauaccucccaacuucaca

SEQ ID NO: 4609 - RNA, 19 nt, Artificial Sequence
  Description of Artificial Sequence: Synthetic oligonucleotide
caauaccucccaacuucac

SEQ ID NO: 4610 - RNA, 19 nt, Artificial Sequence
  Description of Artificial Sequence: Synthetic oligonucleotide
gcaauaccucccaacuuca

SEQ ID NO: 4611 - RNA, 19 nt, Artificial Sequence
  Description of Artificial Sequence: Synthetic oligonucleotide
ggcaauaccucccaacuuc

SEQ ID NO: 4612 - RNA, 19 nt, Artificial Sequence
  Description of Artificial Sequence: Synthetic oligonucleotide
uggcaauaccucccaacuu

SEQ ID NO: 4613 - RNA, 19 nt, Artificial Sequence
  Description of Artificial Sequence: Synthetic oligonucleotide
guggcaauaccucccaacu

SEQ ID NO: 4614 - RNA, 19 nt, Artificial Sequence
  Description of Artificial Sequence: Synthetic oligonucleotide
uguggcaauaccucccaac

SEQ ID NO: 4615 - RNA, 19 nt, Artificial Sequence
  Description of Artificial Sequence: Synthetic oligonucleotide
cuguggcaauaccucccaa

SEQ ID NO: 4616 - RNA, 19 nt, Artificial Sequence
  Description of Artificial Sequence: Synthetic oligonucleotide
acuguggcaauaccuccca

SEQ ID NO: 4617 - RNA, 19 nt, Artificial Sequence
  Description of Artificial Sequence: Synthetic oligonucleotide
gacuguggcaauaccuccc

SEQ ID NO: 4618 - RNA, 19 nt, Artificial Sequence
  Description of Artificial Sequence: Synthetic oligonucleotide
ggacuguggcaauaccucc

SEQ ID NO: 4619 - RNA, 19 nt, Artificial Sequence
  Description of Artificial Sequence: Synthetic oligonucleotide
gggacuguggcaauaccuc

SEQ ID NO: 4620 - RNA, 19 nt, Artificial Sequence
  Description of Artificial Sequence: Synthetic oligonucleotide
ggggacuguggcaauaccu

SEQ ID NO: 4621 - RNA, 19 nt, Artificial Sequence
  Description of Artificial Sequence: Synthetic oligonucleotide
uggggacuguggcaauacc

SEQ ID NO: 4622 - RNA, 19 nt, Artificial Sequence
  Description of Artificial Sequence: Synthetic oligonucleotide
guggggacuguggcaauac

SEQ ID NO: 4623 - RNA, 19 nt, Artificial Sequence
  Description of Artificial Sequence: Synthetic oligonucleotide
gguggggacuguggcaaua

SEQ ID NO: 4624 - RNA, 19 nt, Artificial Sequence
  Description of Artificial Sequence: Synthetic oligonucleotide
ugguggggacuguggcaau

SEQ ID NO: 4625 - RNA, 19 nt, Artificial Sequence
  Description of Artificial Sequence: Synthetic oligonucleotide
uugguggggacuguggcaa

SEQ ID NO: 4626 - RNA, 19 nt, Artificial Sequence
  Description of Artificial Sequence: Synthetic oligonucleotide
cuugguggggacuguggca

SEQ ID NO: 4627 - RNA, 19 nt, Artificial Sequence
  Description of Artificial Sequence: Synthetic oligonucleotide
ccuugguggggacuguggc

SEQ ID NO: 4628 - RNA, 19 nt, Artificial Sequence
  Description of Artificial Sequence: Synthetic oligonucleotide
uccuugguggggacugugg

SEQ ID NO: 4629 - RNA, 19 nt, Artificial Sequence
  Description of Artificial Sequence: Synthetic oligonucleotide
auccuugguggggacugug

SEQ ID NO: 4630 - RNA, 19 nt, Artificial Sequence
  Description of Artificial Sequence: Synthetic oligonucleotide
gauccuugguggggacugu

SEQ ID NO: 4631 - RNA, 19 nt, Artificial Sequence
  Description of Artificial Sequence: Synthetic oligonucleotide
ugauccuugguggggacug

SEQ ID NO: 4632 - RNA, 19 nt, Artificial Sequence
  Description of Artificial Sequence: Synthetic oligonucleotide
augauccuugguggggacu

SEQ ID NO: 4633 - RNA, 19 nt, Artificial Sequence
  Description of Artificial Sequence: Synthetic oligonucleotide
gaugauccuugguggggac

SEQ ID NO: 4634 - RNA, 19 nt, Artificial Sequence
  Description of Artificial Sequence: Synthetic oligonucleotide
cgaugauccuuggugggga

SEQ ID NO: 4635 - RNA, 19 nt, Artificial Sequence
  Description of Artificial Sequence: Synthetic oligonucleotide
ccgaugauccuuggugggg

SEQ ID NO: 4636 - RNA, 19 nt, Artificial Sequence
  Description of Artificial Sequence: Synthetic oligonucleotide
gccgaugauccuugguggg

SEQ ID NO: 4637 - RNA, 19 nt, Artificial Sequence
  Description of Artificial Sequence: Synthetic oligonucleotide
ggccgaugauccuuggugg

SEQ ID NO: 4638 - RNA, 19 nt, Artificial Sequence
  Description of Artificial Sequence: Synthetic oligonucleotide
aggccgaugauccuuggug

SEQ ID NO: 4639 - RNA, 19 nt, Artificial Sequence
  Description of Artificial Sequence: Synthetic oligonucleotide
caggccgaugauccuuggu

SEQ ID NO: 4640 - RNA, 19 nt, Artificial Sequence
  Description of Artificial Sequence: Synthetic oligonucleotide
gcaggccgaugauccuugg

SEQ ID NO: 4641 - RNA, 19 nt, Artificial Sequence
  Description of Artificial Sequence: Synthetic oligonucleotide
ugcaggccgaugauccuug

SEQ ID NO: 4642 - RNA, 19 nt, Artificial Sequence
  Description of Artificial Sequence: Synthetic oligonucleotide
augcaggccgaugauccuu

SEQ ID NO: 4643 - RNA, 19 nt, Artificial Sequence
  Description of Artificial Sequence: Synthetic oligonucleotide
caugcaggccgaugauccu

SEQ ID NO: 4644 - RNA, 19 nt, Artificial Sequence
  Description of Artificial Sequence: Synthetic oligonucleotide
ccaugcaggccgaugaucc

SEQ ID NO: 4645 - RNA, 19 nt, Artificial Sequence
  Description of Artificial Sequence: Synthetic oligonucleotide
accaugcaggccgaugauc

SEQ ID NO: 4646 - RNA, 19 nt, Artificial Sequence
  Description of Artificial Sequence: Synthetic oligonucleotide
caccaugcaggccgaugau

SEQ ID NO: 4647 - RNA, 19 nt, Artificial Sequence
  Description of Artificial Sequence: Synthetic oligonucleotide
acaccaugcaggccgauga

SEQ ID NO: 4648 - RNA, 19 nt, Artificial Sequence
  Description of Artificial Sequence: Synthetic oligonucleotide
cacaccaugcaggccgaug

SEQ ID NO: 4649 - RNA, 19 nt, Artificial Sequence
  Description of Artificial Sequence: Synthetic oligonucleotide
acacaccaugcaggccgau

SEQ ID NO: 4650 - RNA, 19 nt, Artificial Sequence
  Description of Artificial Sequence: Synthetic oligonucleotide
gacacaccaugcaggccga

SEQ ID NO: 4651 - RNA, 19 nt, Artificial Sequence
  Description of Artificial Sequence: Synthetic oligonucleotide
cgacacaccaugcaggccg

SEQ ID NO: 4652 - RNA, 19 nt, Artificial Sequence
  Description of Artificial Sequence: Synthetic oligonucleotide
ccgacacaccaugcaggcc

SEQ ID NO: 4653 - RNA, 19 nt, Artificial Sequence
  Description of Artificial Sequence: Synthetic oligonucleotide
uccgacacaccaugcaggc

SEQ ID NO: 4654 - RNA, 19 nt, Artificial Sequence
  Description of Artificial Sequence: Synthetic oligonucleotide
cuccgacacaccaugcagg

SEQ ID NO: 4655 - RNA, 19 nt, Artificial Sequence
  Description of Artificial Sequence: Synthetic oligonucleotide
ucuccgacacaccaugcag

SEQ ID NO: 4656 - RNA, 19 nt, Artificial Sequence
  Description of Artificial Sequence: Synthetic oligonucleotide
uucuccgacacaccaugca

SEQ ID NO: 4657 - RNA, 19 nt, Artificial Sequence
  Description of Artificial Sequence: Synthetic oligonucleotide
uuucuccgacacaccaugc

SEQ ID NO: 4658 - RNA, 19 nt, Artificial Sequence
  Description of Artificial Sequence: Synthetic oligonucleotide
uuuucuccgacacaccaug

SEQ ID NO: 4659 - RNA, 19 nt, Artificial Sequence
  Description of Artificial Sequence: Synthetic oligonucleotide
uuuuucuccgacacaccau

SEQ ID NO: 4660 - RNA, 19 nt, Artificial Sequence
  Description of Artificial Sequence: Synthetic oligonucleotide
uuuuuucuccgacacacca

SEQ ID NO: 4661 - RNA, 19 nt, Artificial Sequence
  Description of Artificial Sequence: Synthetic oligonucleotide
cuuuuuucuccgacacacc

SEQ ID NO: 4662 - RNA, 19 nt, Artificial Sequence
  Description of Artificial Sequence: Synthetic oligonucleotide
ucuuuuuucuccgacacac

SEQ ID NO: 4663 - RNA, 19 nt, Artificial Sequence
  Description of Artificial Sequence: Synthetic oligonucleotide
uucuuuuuucuccgacaca

SEQ ID NO: 4664 - RNA, 19 nt, Artificial Sequence
  Description of Artificial Sequence: Synthetic oligonucleotide
cuucuuuuuucuccgacac

SEQ ID NO: 4665 - RNA, 19 nt, Artificial Sequence
  Description of Artificial Sequence: Synthetic oligonucleotide
gcuucuuuuuucuccgaca

SEQ ID NO: 4666 - RNA, 19 nt, Artificial Sequence
  Description of Artificial Sequence: Synthetic oligonucleotide
cgcuucuuuuuucuccgac

SEQ ID NO: 4667 - RNA, 19 nt, Artificial Sequence
  Description of Artificial Sequence: Synthetic oligonucleotide
gcgcuucuuuuuucuccga

SEQ ID NO: 4668 - RNA, 19 nt, Artificial Sequence
  Description of Artificial Sequence: Synthetic oligonucleotide
agcgcuucuuuuuucuccg

SEQ ID NO: 4669 - RNA, 19 nt, Artificial Sequence
  Description of Artificial Sequence: Synthetic oligonucleotide
cagcgcuucuuuuuucucc

SEQ ID NO: 4670 - RNA, 19 nt, Artificial Sequence
  Description of Artificial Sequence: Synthetic oligonucleotide
gcagcgcuucuuuuuucuc

SEQ ID NO: 4671 - RNA, 19 nt, Artificial Sequence
  Description of Artificial Sequence: Synthetic oligonucleotide
ggcagcgcuucuuuuuucu

SEQ ID NO: 4672 - RNA, 19 nt, Artificial Sequence
  Description of Artificial Sequence: Synthetic oligonucleotide
uggcagcgcuucuuuuuuc

SEQ ID NO: 4673 - RNA, 19 nt, Artificial Sequence
  Description of Artificial Sequence: Synthetic oligonucleotide
guggcagcgcuucuuuuuu

SEQ ID NO: 4674 - RNA, 19 nt, Artificial Sequence
  Description of Artificial Sequence: Synthetic oligonucleotide
gguggcagcgcuucuuuuu

SEQ ID NO: 4675 - RNA, 19 nt, Artificial Sequence
  Description of Artificial Sequence: Synthetic oligonucleotide
cgguggcagcgcuucuuuu

SEQ ID NO: 4676 - RNA, 19 nt, Artificial Sequence
  Description of Artificial Sequence: Synthetic oligonucleotide
ucgguggcagcgcuucuuu

SEQ ID NO: 4677 - RNA, 19 nt, Artificial Sequence
  Description of Artificial Sequence: Synthetic oligonucleotide
cucgguggcagcgcuucuu

SEQ ID NO: 4678 - RNA, 19 nt, Artificial Sequence
  Description of Artificial Sequence: Synthetic oligonucleotide
ucucgguggcagcgcuucu

SEQ ID NO: 4679 - RNA, 19 nt, Artificial Sequence
  Description of Artificial Sequence: Synthetic oligonucleotide
aucucgguggcagcgcuuc

SEQ ID NO: 4680 - RNA, 19 nt, Artificial Sequence
  Description of Artificial Sequence: Synthetic oligonucleotide
caucucgguggcagcgcuu

SEQ ID NO: 4681 - RNA, 19 nt, Artificial Sequence
  Description of Artificial Sequence: Synthetic oligonucleotide
ccaucucgguggcagcgcu

SEQ ID NO: 4682 - RNA, 19 nt, Artificial Sequence
  Description of Artificial Sequence: Synthetic oligonucleotide
gccaucucgguggcagcgc

SEQ ID NO: 4683 - RNA, 19 nt, Artificial Sequence
  Description of Artificial Sequence: Synthetic oligonucleotide
ugccaucucgguggcagcg

SEQ ID NO: 4684 - RNA, 19 nt, Artificial Sequence
  Description of Artificial Sequence: Synthetic oligonucleotide
augccaucucgguggcagc

SEQ ID NO: 4685 - RNA, 19 nt, Artificial Sequence
  Description of Artificial Sequence: Synthetic oligonucleotide
caugccaucucgguggcag

SEQ ID NO: 4686 - RNA, 19 nt, Artificial Sequence
  Description of Artificial Sequence: Synthetic oligonucleotide
acaugccaucucgguggca

SEQ ID NO: 4687 - RNA, 19 nt, Artificial Sequence
  Description of Artificial Sequence: Synthetic oligonucleotide
cacaugccaucucgguggc

SEQ ID NO: 4688 - RNA, 19 nt, Artificial Sequence
  Description of Artificial Sequence: Synthetic oligonucleotide
gcacaugccaucucggugg

SEQ ID NO: 4689 - RNA, 19 nt, Artificial Sequence
  Description of Artificial Sequence: Synthetic oligonucleotide
agcacaugccaucucggug

SEQ ID NO: 4690 - RNA, 19 nt, Artificial Sequence
  Description of Artificial Sequence: Synthetic oligonucleotide
cagcacaugccaucucggu

SEQ ID NO: 4691 - RNA, 19 nt, Artificial Sequence
  Description of Artificial Sequence: Synthetic oligonucleotide
gcagcacaugccaucucgg

SEQ ID NO: 4692 - RNA, 19 nt, Artificial Sequence
  Description of Artificial Sequence: Synthetic oligonucleotide
ggcagcacaugccaucucg

SEQ ID NO: 4693 - RNA, 19 nt, Artificial Sequence
  Description of Artificial Sequence: Synthetic oligonucleotide
gggcagcacaugccaucuc

SEQ ID NO: 4694 - RNA, 19 nt, Artificial Sequence
  Description of Artificial Sequence: Synthetic oligonucleotide
ggggcagcacaugccaucu

SEQ ID NO: 4695 - RNA, 19 nt, Artificial Sequence
  Description of Artificial Sequence: Synthetic oligonucleotide
uggggcagcacaugccauc

SEQ ID NO: 4696 - RNA, 19 nt, Artificial Sequence
  Description of Artificial Sequence: Synthetic oligonucleotide
cuggggcagcacaugccau

SEQ ID NO: 4697 - RNA, 19 nt, Artificial Sequence
  Description of Artificial Sequence: Synthetic oligonucleotide
acuggggcagcacaugcca

SEQ ID NO: 4698 - RNA, 19 nt, Artificial Sequence
  Description of Artificial Sequence: Synthetic oligonucleotide
uacuggggcagcacaugcc

SEQ ID NO: 4699 - RNA, 19 nt, Artificial Sequence
  Description of Artificial Sequence: Synthetic oligonucleotide
guacuggggcagcacaugc

SEQ ID NO: 4700 - RNA, 19 nt, Artificial Sequence
  Description of Artificial Sequence: Synthetic oligonucleotide
gguacuggggcagcacaug

SEQ ID NO: 4701 - RNA, 19 nt, Artificial Sequence
  Description of Artificial Sequence: Synthetic oligonucleotide
ggguacuggggcagcacau

SEQ ID NO: 4702 - RNA, 19 nt, Artificial Sequence
  Description of Artificial Sequence: Synthetic oligonucleotide
cggguacuggggcagcaca

SEQ ID NO: 4703 - RNA, 19 nt, Artificial Sequence
  Description of Artificial Sequence: Synthetic oligonucleotide
gcggguacuggggcagcac

SEQ ID NO: 4704 - RNA, 19 nt, Artificial Sequence
  Description of Artificial Sequence: Synthetic oligonucleotide
agcggguacuggggcagca

SEQ ID NO: 4705 - RNA, 19 nt, Artificial Sequence
  Description of Artificial Sequence: Synthetic oligonucleotide
cagcggguacuggggcagc

SEQ ID NO: 4706 - RNA, 19 nt, Artificial Sequence
  Description of Artificial Sequence: Synthetic oligonucleotide
gcagcggguacuggggcag

SEQ ID NO: 4707 - RNA, 19 nt, Artificial Sequence
  Description of Artificial Sequence: Synthetic oligonucleotide
ugcagcggguacuggggca

SEQ ID NO: 4708 - RNA, 19 nt, Artificial Sequence
  Description of Artificial Sequence: Synthetic oligonucleotide
uugcagcggguacuggggc

SEQ ID NO: 4709 - RNA, 19 nt, Artificial Sequence
  Description of Artificial Sequence: Synthetic oligonucleotide
auugcagcggguacugggg

SEQ ID NO: 4710 - RNA, 19 nt, Artificial Sequence
  Description of Artificial Sequence: Synthetic oligonucleotide
uauugcagcggguacuggg

SEQ ID NO: 4711 - RNA, 19 nt, Artificial Sequence
  Description of Artificial Sequence: Synthetic oligonucleotide
uuauugcagcggguacugg

SEQ ID NO: 4712 - RNA, 19 nt, Artificial Sequence
  Description of Artificial Sequence: Synthetic oligonucleotide
auuauugcagcggguacug

SEQ ID NO: 4713 - RNA, 19 nt, Artificial Sequence
  Description of Artificial Sequence: Synthetic oligonucleotide
cauuauugcagcggguacu

SEQ ID NO: 4714 - RNA, 19 nt, Artificial Sequence
  Description of Artificial Sequence: Synthetic oligonucleotide
ccauuauugcagcggguac

SEQ ID NO: 4715 - RNA, 19 nt, Artificial Sequence
  Description of Artificial Sequence: Synthetic oligonucleotide
gccauuauugcagcgggua

SEQ ID NO: 4716 - RNA, 19 nt, Artificial Sequence
  Description of Artificial Sequence: Synthetic oligonucleotide
ugccauuauugcagcgggu

SEQ ID NO: 4717 - RNA, 19 nt, Artificial Sequence
  Description of Artificial Sequence: Synthetic oligonucleotide
augccauuauugcagcggg

SEQ ID NO: 4718 - RNA, 19 nt, Artificial Sequence
  Description of Artificial Sequence: Synthetic oligonucleotide
gaugccauuauugcagcgg

SEQ ID NO: 4719 - RNA, 19 nt, Artificial Sequence
  Description of Artificial Sequence: Synthetic oligonucleotide
agaugccauuauugcagcg

SEQ ID NO: 4720 - RNA, 19 nt, Artificial Sequence
  Description of Artificial Sequence: Synthetic oligonucleotide
cagaugccauuauugcagc

SEQ ID NO: 4721 - RNA, 19 nt, Artificial Sequence
  Description of Artificial Sequence: Synthetic oligonucleotide
acagaugccauuauugcag

SEQ ID NO: 4722 - RNA, 19 nt, Artificial Sequence
  Description of Artificial Sequence: Synthetic oligonucleotide
uacagaugccauuauugca

SEQ ID NO: 4723 - RNA, 19 nt, Artificial Sequence
  Description of Artificial Sequence: Synthetic oligonucleotide
auacagaugccauuauugc

SEQ ID NO: 4724 - RNA, 19 nt, Artificial Sequence
  Description of Artificial Sequence: Synthetic oligonucleotide
gauacagaugccauuauug

SEQ ID NO: 4725 - RNA, 19 nt, Artificial Sequence
  Description of Artificial Sequence: Synthetic oligonucleotide
ggauacagaugccauuauu

SEQ ID NO: 4726 - RNA, 19 nt, Artificial Sequence
  Description of Artificial Sequence: Synthetic oligonucleotide
gggauacagaugccauuau

SEQ ID NO: 4727 - RNA, 19 nt, Artificial Sequence
  Description of Artificial Sequence: Synthetic oligonucleotide
ugggauacagaugccauua

SEQ ID NO: 4728 - RNA, 19 nt, Artificial Sequence
  Description of Artificial Sequence: Synthetic oligonucleotide
cugggauacagaugccauu

SEQ ID NO: 4729 - RNA, 19 nt, Artificial Sequence
  Description of Artificial Sequence: Synthetic oligonucleotide
acugggauacagaugccau

SEQ ID NO: 4730 - RNA, 19 nt, Artificial Sequence
  Description of Artificial Sequence: Synthetic oligonucleotide
aacugggauacagaugcca

SEQ ID NO: 4731 - RNA, 19 nt, Artificial Sequence
  Description of Artificial Sequence: Synthetic oligonucleotide
uaacugggauacagaugcc

SEQ ID NO: 4732 - RNA, 19 nt, Artificial Sequence
  Description of Artificial Sequence: Synthetic oligonucleotide
guaacugggauacagaugc

SEQ ID NO: 4733 - RNA, 19 nt, Artificial Sequence
  Description of Artificial Sequence: Synthetic oligonucleotide
aguaacugggauacagaug

SEQ ID NO: 4734 - RNA, 19 nt, Artificial Sequence
  Description of Artificial Sequence: Synthetic oligonucleotide
caguaacugggauacagau

SEQ ID NO: 4735 - RNA, 19 nt, Artificial Sequence
  Description of Artificial Sequence: Synthetic oligonucleotide
ucaguaacugggauacaga

SEQ ID NO: 4736 - RNA, 19 nt, Artificial Sequence
  Description of Artificial Sequence: Synthetic oligonucleotide
uucaguaacugggauacag

SEQ ID NO: 4737 - RNA, 19 nt, Artificial Sequence
  Description of Artificial Sequence: Synthetic oligonucleotide
uuucaguaacugggauaca

SEQ ID NO: 4738 - RNA, 19 nt, Artificial Sequence
  Description of Artificial Sequence: Synthetic oligonucleotide
cuuucaguaacugggauac

SEQ ID NO: 4739 - RNA, 19 nt, Artificial Sequence
  Description of Artificial Sequence: Synthetic oligonucleotide
gcuuucaguaacugggaua

SEQ ID NO: 4740 - RNA, 19 nt, Artificial Sequence
  Description of Artificial Sequence: Synthetic oligonucleotide
ugcuuucaguaacugggau

SEQ ID NO: 4741 - RNA, 19 nt, Artificial Sequence
  Description of Artificial Sequence: Synthetic oligonucleotide
augcuuucaguaacuggga

SEQ ID NO: 4742 - RNA, 19 nt, Artificial Sequence
  Description of Artificial Sequence: Synthetic oligonucleotide
gaugcuuucaguaacuggg

SEQ ID NO: 4743 - RNA, 19 nt, Artificial Sequence
  Description of Artificial Sequence: Synthetic oligonucleotide
agaugcuuucaguaacugg

SEQ ID NO: 4744 - RNA, 19 nt, Artificial Sequence
  Description of Artificial Sequence: Synthetic oligonucleotide
aagaugcuuucaguaacug

SEQ ID NO: 4745 - RNA, 19 nt, Artificial Sequence
  Description of Artificial Sequence: Synthetic oligonucleotide
uaagaugcuuucaguaacu

SEQ ID NO: 4746 - RNA, 19 nt, Artificial Sequence
  Description of Artificial Sequence: Synthetic oligonucleotide
uuaagaugcuuucaguaac

SEQ ID NO: 4747 - RNA, 19 nt, Artificial Sequence
  Description of Artificial Sequence: Synthetic oligonucleotide
guuaagaugcuuucaguaa

SEQ ID NO: 4748 - RNA, 19 nt, Artificial Sequence
  Description of Artificial Sequence: Synthetic oligonucleotide
gguuaagaugcuuucagua

SEQ ID NO: 4749 - RNA, 19 nt, Artificial Sequence
  Description of Artificial Sequence: Synthetic oligonucleotide
ggguuaagaugcuuucagu

SEQ ID NO: 4750 - RNA, 19 nt, Artificial Sequence
  Description of Artificial Sequence: Synthetic oligonucleotide
gggguuaagaugcuuucag

SEQ ID NO: 4751 - RNA, 19 nt, Artificial Sequence
  Description of Artificial Sequence: Synthetic oligonucleotide
agggguuaagaugcuuuca

SEQ ID NO: 4752 - RNA, 19 nt, Artificial Sequence
  Description of Artificial Sequence: Synthetic oligonucleotide
gagggguuaagaugcuuuc

SEQ ID NO: 4753 - RNA, 19 nt, Artificial Sequence
  Description of Artificial Sequence: Synthetic oligonucleotide
ugagggguuaagaugcuuu

SEQ ID NO: 4754 - RNA, 19 nt, Artificial Sequence
  Description of Artificial Sequence: Synthetic oligonucleotide
gugagggguuaagaugcuu

SEQ ID NO: 4755 - RNA, 19 nt, Artificial Sequence
  Description of Artificial Sequence: Synthetic oligonucleotide
ugugagggguuaagaugcu

SEQ ID NO: 4756 - RNA, 19 nt, Artificial Sequence
  Description of Artificial Sequence: Synthetic oligonucleotide
augugagggguuaagaugc

SEQ ID NO: 4757 - RNA, 19 nt, Artificial Sequence
  Description of Artificial Sequence: Synthetic oligonucleotide
gaugugagggguuaagaug

SEQ ID NO: 4758 - RNA, 19 nt, Artificial Sequence
  Description of Artificial Sequence: Synthetic oligonucleotide
ggaugugagggguuaagau

SEQ ID NO: 4759 - RNA, 19 nt, Artificial Sequence
  Description of Artificial Sequence: Synthetic oligonucleotide
gggaugugagggguuaaga

SEQ ID NO: 4760 - RNA, 19 nt, Artificial Sequence
  Description of Artificial Sequence: Synthetic oligonucleotide
cgggaugugagggguuaag

SEQ ID NO: 4761 - RNA, 19 nt, Artificial Sequence
  Description of Artificial Sequence: Synthetic oligonucleotide
ccgggaugugagggguuaa

SEQ ID NO: 4762 - RNA, 19 nt, Artificial Sequence
  Description of Artificial Sequence: Synthetic oligonucleotide
gccgggaugugagggguua

SEQ ID NO: 4763 - RNA, 19 nt, Artificial Sequence
  Description of Artificial Sequence: Synthetic oligonucleotide
agccgggaugugagggguu

SEQ ID NO: 4764 - RNA, 19 nt, Artificial Sequence
  Description of Artificial Sequence: Synthetic oligonucleotide
gagccgggaugugaggggu

SEQ ID NO: 4765 - RNA, 19 nt, Artificial Sequence
  Description of Artificial Sequence: Synthetic oligonucleotide
agagccgggaugugagggg

SEQ ID NO: 4766 - RNA, 19 nt, Artificial Sequence
  Description of Artificial Sequence: Synthetic oligonucleotide
cagagccgggaugugaggg

SEQ ID NO: 4767 - RNA, 19 nt, Artificial Sequence
  Description of Artificial Sequence: Synthetic oligonucleotide
ccagagccgggaugugagg

SEQ ID NO: 4768 - RNA, 19 nt, Artificial Sequence
  Description of Artificial Sequence: Synthetic oligonucleotide
uccagagccgggaugugag

SEQ ID NO: 4769 - RNA, 19 nt, Artificial Sequence
  Description of Artificial Sequence: Synthetic oligonucleotide
auccagagccgggauguga

SEQ ID NO: 4770 - RNA, 19 nt, Artificial Sequence
  Description of Artificial Sequence: Synthetic oligonucleotide
cauccagagccgggaugug

SEQ ID NO: 4771 - RNA, 19 nt, Artificial Sequence
  Description of Artificial Sequence: Synthetic oligonucleotide
ccauccagagccgggaugu

SEQ ID NO: 4772 - RNA, 19 nt, Artificial Sequence
  Description of Artificial Sequence: Synthetic oligonucleotide
accauccagagccgggaug

SEQ ID NO: 4773 - RNA, 19 nt, Artificial Sequence
  Description of Artificial Sequence: Synthetic oligonucleotide
uaccauccagagccgggau

SEQ ID NO: 4774 - RNA, 19 nt, Artificial Sequence
  Description of Artificial Sequence: Synthetic oligonucleotide
guaccauccagagccggga

SEQ ID NO: 4775 - RNA, 19 nt, Artificial Sequence
  Description of Artificial Sequence: Synthetic oligonucleotide
aguaccauccagagccggg

SEQ ID NO: 4776 - RNA, 19 nt, Artificial Sequence
  Description of Artificial Sequence: Synthetic oligonucleotide
gaguaccauccagagccgg

SEQ ID NO: 4777 - RNA, 19 nt, Artificial Sequence
  Description of Artificial Sequence: Synthetic oligonucleotide
cgaguaccauccagagccg

SEQ ID NO: 4778 - RNA, 19 nt, Artificial Sequence
  Description of Artificial Sequence: Synthetic oligonucleotide
ccgaguaccauccagagcc

SEQ ID NO: 4779 - RNA, 19 nt, Artificial Sequence
  Description of Artificial Sequence: Synthetic oligonucleotide
gccgaguaccauccagagc

SEQ ID NO: 4780 - RNA, 19 nt, Artificial Sequence
  Description of Artificial Sequence: Synthetic oligonucleotide
ugccgaguaccauccagag

SEQ ID NO: 4781 - RNA, 19 nt, Artificial Sequence
  Description of Artificial Sequence: Synthetic oligonucleotide
gugccgaguaccauccaga

SEQ ID NO: 4782 - RNA, 19 nt, Artificial Sequence
  Description of Artificial Sequence: Synthetic oligonucleotide
ugugccgaguaccauccag

SEQ ID NO: 4783 - RNA, 19 nt, Artificial Sequence
  Description of Artificial Sequence: Synthetic oligonucleotide
cugugccgaguaccaucca

SEQ ID NO: 4784 - RNA, 19 nt, Artificial Sequence
  Description of Artificial Sequence: Synthetic oligonucleotide
ucugugccgaguaccaucc

SEQ ID NO: 4785 - RNA, 19 nt, Artificial Sequence
  Description of Artificial Sequence: Synthetic oligonucleotide
cucugugccgaguaccauc

SEQ ID NO: 4786 - RNA, 19 nt, Artificial Sequence
  Description of Artificial Sequence: Synthetic oligonucleotide
ucucugugccgaguaccau

SEQ ID NO: 4787 - RNA, 19 nt, Artificial Sequence
  Description of Artificial Sequence: Synthetic oligonucleotide
aucucugugccgaguacca

SEQ ID NO: 4788 - RNA, 19 nt, Artificial Sequence
  Description of Artificial Sequence: Synthetic oligonucleotide
gaucucugugccgaguacc

SEQ ID NO: 4789 - RNA, 19 nt, Artificial Sequence
  Description of Artificial Sequence: Synthetic oligonucleotide
cgaucucugugccgaguac

SEQ ID NO: 4790 - RNA, 19 nt, Artificial Sequence
  Description of Artificial Sequence: Synthetic oligonucleotide
ucgaucucugugccgagua

SEQ ID NO: 4791 - RNA, 19 nt, Artificial Sequence
  Description of Artificial Sequence: Synthetic oligonucleotide
uucgaucucugugccgagu

SEQ ID NO: 4792 - RNA, 19 nt, Artificial Sequence
  Description of Artificial Sequence: Synthetic oligonucleotide
uuucgaucucugugccgag

SEQ ID NO: 4793 - RNA, 19 nt, Artificial Sequence
  Description of Artificial Sequence: Synthetic oligonucleotide
guuucgaucucugugccga

SEQ ID NO: 4794 - RNA, 19 nt, Artificial Sequence
  Description of Artificial Sequence: Synthetic oligonucleotide
gguuucgaucucugugccg

SEQ ID NO: 4795 - RNA, 19 nt, Artificial Sequence
  Description of Artificial Sequence: Synthetic oligonucleotide
ugguuucgaucucugugcc

SEQ ID NO: 4796 - RNA, 19 nt, Artificial Sequence
  Description of Artificial Sequence: Synthetic oligonucleotide
gugguuucgaucucugugc

SEQ ID NO: 4797 - RNA, 19 nt, Artificial Sequence
  Description of Artificial Sequence: Synthetic oligonucleotide
cgugguuucgaucucugug

SEQ ID NO: 4798 - RNA, 19 nt, Artificial Sequence
  Description of Artificial Sequence: Synthetic oligonucleotide
ccgugguuucgaucucugu

SEQ ID NO: 4799 - RNA, 19 nt, Artificial Sequence
  Description of Artificial Sequence: Synthetic oligonucleotide
accgugguuucgaucucug

SEQ ID NO: 4800 - RNA, 19 nt, Artificial Sequence
  Description of Artificial Sequence: Synthetic oligonucleotide
gaccgugguuucgaucucu

SEQ ID NO: 4801 - RNA, 19 nt, Artificial Sequence
  Description of Artificial Sequence: Synthetic oligonucleotide
ugaccgugguuucgaucuc

SEQ ID NO: 4802 - RNA, 19 nt, Artificial Sequence
  Description of Artificial Sequence: Synthetic oligonucleotide
augaccgugguuucgaucu

SEQ ID NO: 4803 - RNA, 19 nt, Artificial Sequence
  Description of Artificial Sequence: Synthetic oligonucleotide
aaugaccgugguuucgauc

SEQ ID NO: 4804 - RNA, 19 nt, Artificial Sequence
  Description of Artificial Sequence: Synthetic oligonucleotide
uaaugaccgugguuucgau

SEQ ID NO: 4805 - RNA, 19 nt, Artificial Sequence
  Description of Artificial Sequence: Synthetic oligonucleotide
guaaugaccgugguuucga

SEQ ID NO: 4806 - RNA, 19 nt, Artificial Sequence
  Description of Artificial Sequence: Synthetic oligonucleotide
aguaaugaccgugguuucg

SEQ ID NO: 4807 - RNA, 19 nt, Artificial Sequence
  Description of Artificial Sequence: Synthetic oligonucleotide
gaguaaugaccgugguuuc

SEQ ID NO: 4808 - RNA, 19 nt, Artificial Sequence
  Description of Artificial Sequence: Synthetic oligonucleotide
ugaguaaugaccgugguuu

SEQ ID NO: 4809 - RNA, 19 nt, Artificial Sequence
  Description of Artificial Sequence: Synthetic oligonucleotide
uugaguaaugaccgugguu

SEQ ID NO: 4810 - RNA, 19 nt, Artificial Sequence
  Description of Artificial Sequence: Synthetic oligonucleotide
uuugaguaaugaccguggu

SEQ ID NO: 4811 - RNA, 19 nt, Artificial Sequence
  Description of Artificial Sequence: Synthetic oligonucleotide
guuugaguaaugaccgugg

SEQ ID NO: 4812 - RNA, 19 nt, Artificial Sequence
  Description of Artificial Sequence: Synthetic oligonucleotide
gguuugaguaaugaccgug

SEQ ID NO: 4813 - RNA, 19 nt, Artificial Sequence
  Description of Artificial Sequence: Synthetic oligonucleotide
ugguuugaguaaugaccgu

SEQ ID NO: 4814 - RNA, 19 nt, Artificial Sequence
  Description of Artificial Sequence: Synthetic oligonucleotide
augguuugaguaaugaccg

SEQ ID NO: 4815 - RNA, 19 nt, Artificial Sequence
  Description of Artificial Sequence: Synthetic oligonucleotide
caugguuugaguaaugacc

SEQ ID NO: 4816 - RNA, 19 nt, Artificial Sequence
  Description of Artificial Sequence: Synthetic oligonucleotide
ucaugguuugaguaaugac

SEQ ID NO: 4817 - RNA, 19 nt, Artificial Sequence
  Description of Artificial Sequence: Synthetic oligonucleotide
gucaugguuugaguaauga

SEQ ID NO: 4818 - RNA, 19 nt, Artificial Sequence
  Description of Artificial Sequence: Synthetic oligonucleotide
agucaugguuugaguaaug

SEQ ID NO: 4819 - RNA, 19 nt, Artificial Sequence
  Description of Artificial Sequence: Synthetic oligonucleotide
aagucaugguuugaguaau

SEQ ID NO: 4820 - RNA, 19 nt, Artificial Sequence
  Description of Artificial Sequence: Synthetic oligonucleotide
caagucaugguuugaguaa

SEQ ID NO: 4821 - RNA, 19 nt, Artificial Sequence
  Description of Artificial Sequence: Synthetic oligonucleotide
ccaagucaugguuugagua

SEQ ID NO: 4822 - RNA, 19 nt, Artificial Sequence
  Description of Artificial Sequence: Synthetic oligonucleotide
cccaagucaugguuugagu

SEQ ID NO: 4823 - RNA, 19 nt, Artificial Sequence
  Description of Artificial Sequence: Synthetic oligonucleotide
ucccaagucaugguuugag

SEQ ID NO: 4824 - RNA, 19 nt, Artificial Sequence
  Description of Artificial Sequence: Synthetic oligonucleotide
aucccaagucaugguuuga

SEQ ID NO: 4825 - RNA, 19 nt, Artificial Sequence
  Description of Artificial Sequence: Synthetic oligonucleotide
caucccaagucaugguuug

SEQ ID NO: 4826 - RNA, 19 nt, Artificial Sequence
  Description of Artificial Sequence: Synthetic oligonucleotide
ccaucccaagucaugguuu

SEQ ID NO: 4827 - RNA, 19 nt, Artificial Sequence
  Description of Artificial Sequence: Synthetic oligonucleotide
gccaucccaagucaugguu

SEQ ID NO: 4828 - RNA, 19 nt, Artificial Sequence
  Description of Artificial Sequence: Synthetic oligonucleotide
ugccaucccaagucauggu

SEQ ID NO: 4829 - RNA, 19 nt, Artificial Sequence
  Description of Artificial Sequence: Synthetic oligonucleotide
cugccaucccaagucaugg

SEQ ID NO: 4830 - RNA, 19 nt, Artificial Sequence
  Description of Artificial Sequence: Synthetic oligonucleotide
ucugccaucccaagucaug

SEQ ID NO: 4831 - RNA, 19 nt, Artificial Sequence
  Description of Artificial Sequence: Synthetic oligonucleotide
uucugccaucccaagucau

SEQ ID NO: 4832 - RNA, 19 nt, Artificial Sequence
  Description of Artificial Sequence: Synthetic oligonucleotide
auucugccaucccaaguca

SEQ ID NO: 4833 - RNA, 19 nt, Artificial Sequence
  Description of Artificial Sequence: Synthetic oligonucleotide
gauucugccaucccaaguc

SEQ ID NO: 4834 - RNA, 19 nt, Artificial Sequence
  Description of Artificial Sequence: Synthetic oligonucleotide
agauucugccaucccaagu

SEQ ID NO: 4835 - RNA, 19 nt, Artificial Sequence
  Description of Artificial Sequence: Synthetic oligonucleotide
uagauucugccaucccaag

SEQ ID NO: 4836 - RNA, 19 nt, Artificial Sequence
  Description of Artificial Sequence: Synthetic oligonucleotide
cuagauucugccaucccaa

SEQ ID NO: 4837 - RNA, 19 nt, Artificial Sequence
  Description of Artificial Sequence: Synthetic oligonucleotide
ccuagauucugccauccca

SEQ ID NO: 4838 - RNA, 19 nt, Artificial Sequence
  Description of Artificial Sequence: Synthetic oligonucleotide
uccuagauucugccauccc

SEQ ID NO: 4839 - RNA, 19 nt, Artificial Sequence
  Description of Artificial Sequence: Synthetic oligonucleotide
uuccuagauucugccaucc

SEQ ID NO: 4840 - RNA, 19 nt, Artificial Sequence
  Description of Artificial Sequence: Synthetic oligonucleotide
cuuccuagauucugccauc

SEQ ID NO: 4841 - RNA, 19 nt, Artificial Sequence
  Description of Artificial Sequence: Synthetic oligonucleotide
ucuuccuagauucugccau

SEQ ID NO: 4842 - RNA, 19 nt, Artificial Sequence
  Description of Artificial Sequence: Synthetic oligonucleotide
gucuuccuagauucugcca

SEQ ID NO: 4843 - RNA, 19 nt, Artificial Sequence
  Description of Artificial Sequence: Synthetic oligonucleotide
ggucuuccuagauucugcc

SEQ ID NO: 4844 - RNA, 19 nt, Artificial Sequence
  Description of Artificial Sequence: Synthetic oligonucleotide
uggucuuccuagauucugc

SEQ ID NO: 4845 - RNA, 19 nt, Artificial Sequence
  Description of Artificial Sequence: Synthetic oligonucleotide
guggucuuccuagauucug

SEQ ID NO: 4846 - RNA, 19 nt, Artificial Sequence
  Description of Artificial Sequence: Synthetic oligonucleotide
uguggucuuccuagauucu

SEQ ID NO: 4847 - RNA, 19 nt, Artificial Sequence
  Description of Artificial Sequence: Synthetic oligonucleotide
guguggucuuccuagauuc

SEQ ID NO: 4848 - RNA, 19 nt, Artificial Sequence
  Description of Artificial Sequence: Synthetic oligonucleotide
uguguggucuuccuagauu

SEQ ID NO: 4849 - RNA, 19 nt, Artificial Sequence
  Description of Artificial Sequence: Synthetic oligonucleotide
guguguggucuuccuagau

SEQ ID NO: 4850 - RNA, 19 nt, Artificial Sequence
  Description of Artificial Sequence: Synthetic oligonucleotide
aguguguggucuuccuaga

SEQ ID NO: 4851 - RNA, 19 nt, Artificial Sequence
  Description of Artificial Sequence: Synthetic oligonucleotide
uaguguguggucuuccuag

SEQ ID NO: 4852 - RNA, 19 nt, Artificial Sequence
  Description of Artificial Sequence: Synthetic oligonucleotide
uuaguguguggucuuccua

SEQ ID NO: 4853 - RNA, 19 nt, Artificial Sequence
  Description of Artificial Sequence: Synthetic oligonucleotide
cuuaguguguggucuuccu

SEQ ID NO: 4854 - RNA, 19 nt, Artificial Sequence
  Description of Artificial Sequence: Synthetic oligonucleotide
ucuuaguguguggucuucc

SEQ ID NO: 4855 - RNA, 19 nt, Artificial Sequence
  Description of Artificial Sequence: Synthetic oligonucleotide
aucuuaguguguggucuuc

SEQ ID NO: 4856 - RNA, 19 nt, Artificial Sequence
  Description of Artificial Sequence: Synthetic oligonucleotide
caucuuaguguguggucuu

SEQ ID NO: 4857 - RNA, 19 nt, Artificial Sequence
  Description of Artificial Sequence: Synthetic oligonucleotide
acaucuuaguguguggucu

SEQ ID NO: 4858 - RNA, 19 nt, Artificial Sequence
  Description of Artificial Sequence: Synthetic oligonucleotide
gacaucuuagugugugguc

SEQ ID NO: 4859 - RNA, 19 nt, Artificial Sequence
  Description of Artificial Sequence: Synthetic oligonucleotide
ugacaucuuaguguguggu

SEQ ID NO: 4860 - RNA, 19 nt, Artificial Sequence
  Description of Artificial Sequence: Synthetic oligonucleotide
gugacaucuuagugugugg

SEQ ID NO: 4861 - RNA, 19 nt, Artificial Sequence
  Description of Artificial Sequence: Synthetic oligonucleotide
ugugacaucuuagugugug

SEQ ID NO: 4862 - RNA, 19 nt, Artificial Sequence
  Description of Artificial Sequence: Synthetic oligonucleotide
augugacaucuuagugugu

SEQ ID NO: 4863 - RNA, 19 nt, Artificial Sequence
  Description of Artificial Sequence: Synthetic oligonucleotide
uaugugacaucuuagugug

SEQ ID NO: 4864 - RNA, 19 nt, Artificial Sequence
  Description of Artificial Sequence: Synthetic oligonucleotide
auaugugacaucuuagugu

SEQ ID NO: 4865 - RNA, 19 nt, Artificial Sequence
  Description of Artificial Sequence: Synthetic oligonucleotide
uauaugugacaucuuagug

SEQ ID NO: 4866 - RNA, 19 nt, Artificial Sequence
  Description of Artificial Sequence: Synthetic oligonucleotide
uuauaugugacaucuuagu

SEQ ID NO: 4867 - RNA, 19 nt, Artificial Sequence
  Description of Artificial Sequence: Synthetic oligonucleotide
uuuauaugugacaucuuag

SEQ ID NO: 4868 - RNA, 19 nt, Artificial Sequence
  Description of Artificial Sequence: Synthetic oligonucleotide
uuuuauaugugacaucuua

SEQ ID NO: 4869 - RNA, 19 nt, Artificial Sequence
  Description of Artificial Sequence: Synthetic oligonucleotide
cuuuuauaugugacaucuu

SEQ ID NO: 4870 - RNA, 19 nt, Artificial Sequence
  Description of Artificial Sequence: Synthetic oligonucleotide
ccuuuuauaugugacaucu

SEQ ID NO: 4871 - RNA, 19 nt, Artificial Sequence
  Description of Artificial Sequence: Synthetic oligonucleotide
cccuuuuauaugugacauc

SEQ ID NO: 4872 - RNA, 19 nt, Artificial Sequence
  Description of Artificial Sequence: Synthetic oligonucleotide
gcccuuuuauaugugacau

SEQ ID NO: 4873 - RNA, 19 nt, Artificial Sequence
  Description of Artificial Sequence: Synthetic oligonucleotide
ugcccuuuuauaugugaca

SEQ ID NO: 4874 - RNA, 19 nt, Artificial Sequence
  Description of Artificial Sequence: Synthetic oligonucleotide
augcccuuuuauaugugac

SEQ ID NO: 4875 - RNA, 19 nt, Artificial Sequence
  Description of Artificial Sequence: Synthetic oligonucleotide
caugcccuuuuauauguga

SEQ ID NO: 4876 - RNA, 19 nt, Artificial Sequence
  Description of Artificial Sequence: Synthetic oligonucleotide
ucaugcccuuuuauaugug

SEQ ID NO: 4877 - RNA, 19 nt, Artificial Sequence
  Description of Artificial Sequence: Synthetic oligonucleotide
uucaugcccuuuuauaugu

SEQ ID NO: 4878 - RNA, 19 nt, Artificial Sequence
  Description of Artificial Sequence: Synthetic oligonucleotide
cuucaugcccuuuuauaug

SEQ ID NO: 4879 - RNA, 19 nt, Artificial Sequence
  Description of Artificial Sequence: Synthetic oligonucleotide
ccuucaugcccuuuuauau

SEQ ID NO: 4880 - RNA, 19 nt, Artificial Sequence
  Description of Artificial Sequence: Synthetic oligonucleotide
uccuucaugcccuuuuaua

SEQ ID NO: 4881 - RNA, 19 nt, Artificial Sequence
  Description of Artificial Sequence: Synthetic oligonucleotide
cuccuucaugcccuuuuau

SEQ ID NO: 4882 - RNA, 19 nt, Artificial Sequence
  Description of Artificial Sequence: Synthetic oligonucleotide
ucuccuucaugcccuuuua

SEQ ID NO: 4883 - RNA, 19 nt, Artificial Sequence
  Description of Artificial Sequence: Synthetic oligonucleotide
gucuccuucaugcccuuuu

SEQ ID NO: 4884 - RNA, 19 nt, Artificial Sequence
  Description of Artificial Sequence: Synthetic oligonucleotide
ggucuccuucaugcccuuu

SEQ ID NO: 4885 - RNA, 19 nt, Artificial Sequence
  Description of Artificial Sequence: Synthetic oligonucleotide
gggucuccuucaugcccuu

SEQ ID NO: 4886 - RNA, 19 nt, Artificial Sequence
  Description of Artificial Sequence: Synthetic oligonucleotide
ggggucuccuucaugcccu

SEQ ID NO: 4887 - RNA, 19 nt, Artificial Sequence
  Description of Artificial Sequence: Synthetic oligonucleotide
aggggucuccuucaugccc

SEQ ID NO: 4888 - RNA, 19 nt, Artificial Sequence
  Description of Artificial Sequence: Synthetic oligonucleotide
caggggucuccuucaugcc

SEQ ID NO: 4889 - RNA, 19 nt, Artificial Sequence
  Description of Artificial Sequence: Synthetic oligonucleotide
gcaggggucuccuucaugc

SEQ ID NO: 4890 - RNA, 19 nt, Artificial Sequence
  Description of Artificial Sequence: Synthetic oligonucleotide
ggcaggggucuccuucaug

SEQ ID NO: 4891 - RNA, 19 nt, Artificial Sequence
  Description of Artificial Sequence: Synthetic oligonucleotide
aggcaggggucuccuucau

SEQ ID NO: 4892 - RNA, 19 nt, Artificial Sequence
  Description of Artificial Sequence: Synthetic oligonucleotide
uaggcaggggucuccuuca

SEQ ID NO: 4893 - RNA, 19 nt, Artificial Sequence
  Description of Artificial Sequence: Synthetic oligonucleotide
guaggcaggggucuccuuc

SEQ ID NO: 4894 - RNA, 19 nt, Artificial Sequence
  Description of Artificial Sequence: Synthetic oligonucleotide
cguaggcaggggucuccuu

SEQ ID NO: 4895 - RNA, 19 nt, Artificial Sequence
  Description of Artificial Sequence: Synthetic oligonucleotide
ucguaggcaggggucuccu

SEQ ID NO: 4896 - RNA, 19 nt, Artificial Sequence
  Description of Artificial Sequence: Synthetic oligonucleotide
aucguaggcaggggucucc

SEQ ID NO: 4897 - RNA, 19 nt, Artificial Sequence
  Description of Artificial Sequence: Synthetic oligonucleotide
gaucguaggcaggggucuc

SEQ ID NO: 4898 - RNA, 19 nt, Artificial Sequence
  Description of Artificial Sequence: Synthetic oligonucleotide
ugaucguaggcaggggucu

SEQ ID NO: 4899 - RNA, 19 nt, Artificial Sequence
  Description of Artificial Sequence: Synthetic oligonucleotide
augaucguaggcagggguc

SEQ ID NO: 4900 - RNA, 19 nt, Artificial Sequence
  Description of Artificial Sequence: Synthetic oligonucleotide
gaugaucguaggcaggggu

SEQ ID NO: 4901 - RNA, 19 nt, Artificial Sequence
  Description of Artificial Sequence: Synthetic oligonucleotide
ugaugaucguaggcagggg

SEQ ID NO: 4902 - RNA, 19 nt, Artificial Sequence
  Description of Artificial Sequence: Synthetic oligonucleotide
cugaugaucguaggcaggg

SEQ ID NO: 4903 - RNA, 19 nt, Artificial Sequence
  Description of Artificial Sequence: Synthetic oligonucleotide
ucugaugaucguaggcagg

SEQ ID NO: 4904 - RNA, 19 nt, Artificial Sequence
  Description of Artificial Sequence: Synthetic oligonucleotide
gucugaugaucguaggcag

SEQ ID NO: 4905 - RNA, 19 nt, Artificial Sequence
  Description of Artificial Sequence: Synthetic oligonucleotide
agucugaugaucguaggca

SEQ ID NO: 4906 - RNA, 19 nt, Artificial Sequence
  Description of Artificial Sequence: Synthetic oligonucleotide
cagucugaugaucguaggc

SEQ ID NO: 4907 - RNA, 19 nt, Artificial Sequence
  Description of Artificial Sequence: Synthetic oligonucleotide
gcagucugaugaucguagg

SEQ ID NO: 4908 - RNA, 19 nt, Artificial Sequence
  Description of Artificial Sequence: Synthetic oligonucleotide
ugcagucugaugaucguag

SEQ ID NO: 4909 - RNA, 19 nt, Artificial Sequence
  Description of Artificial Sequence: Synthetic oligonucleotide
augcagucugaugaucgua

SEQ ID NO: 4910 - RNA, 19 nt, Artificial Sequence
  Description of Artificial Sequence: Synthetic oligonucleotide
aaugcagucugaugaucgu

SEQ ID NO: 4911 - RNA, 19 nt, Artificial Sequence
  Description of Artificial Sequence: Synthetic oligonucleotide
caaugcagucugaugaucg

SEQ ID NO: 4912 - RNA, 19 nt, Artificial Sequence
  Description of Artificial Sequence: Synthetic oligonucleotide
ucaaugcagucugaugauc

SEQ ID NO: 4913 - RNA, 19 nt, Artificial Sequence
  Description of Artificial Sequence: Synthetic oligonucleotide
uucaaugcagucugaugau

SEQ ID NO: 4914 - RNA, 19 nt, Artificial Sequence
  Description of Artificial Sequence: Synthetic oligonucleotide
cuucaaugcagucugauga

SEQ ID NO: 4915 - RNA, 19 nt, Artificial Sequence
  Description of Artificial Sequence: Synthetic oligonucleotide
ccuucaaugcagucugaug

SEQ ID NO: 4916 - RNA, 19 nt, Artificial Sequence
  Description of Artificial Sequence: Synthetic oligonucleotide
cccuucaaugcagucugau

SEQ ID NO: 4917 - RNA, 19 nt, Artificial Sequence
  Description of Artificial Sequence: Synthetic oligonucleotide
acccuucaaugcagucuga

SEQ ID NO: 4918 - RNA, 19 nt, Artificial Sequence
  Description of Artificial Sequence: Synthetic oligonucleotide
aacccuucaaugcagucug

SEQ ID NO: 4919 - RNA, 19 nt, Artificial Sequence
  Description of Artificial Sequence: Synthetic oligonucleotide
aaacccuucaaugcagucu

SEQ ID NO: 4920 - RNA, 19 nt, Artificial Sequence
  Description of Artificial Sequence: Synthetic oligonucleotide
aaaacccuucaaugcaguc

SEQ ID NO: 4921 - RNA, 19 nt, Artificial Sequence
  Description of Artificial Sequence: Synthetic oligonucleotide
caaaacccuucaaugcagu

SEQ ID NO: 4922 - RNA, 19 nt, Artificial Sequence
  Description of Artificial Sequence: Synthetic oligonucleotide
gcaaaacccuucaaugcag

SEQ ID NO: 4923 - RNA, 19 nt, Artificial Sequence
  Description of Artificial Sequence: Synthetic oligonucleotide
agcaaaacccuucaaugca

SEQ ID NO: 4924 - RNA, 19 nt, Artificial Sequence
  Description of Artificial Sequence: Synthetic oligonucleotide
cagcaaaacccuucaaugc

SEQ ID NO: 4925 - RNA, 19 nt, Artificial Sequence
  Description of Artificial Sequence: Synthetic oligonucleotide
acagcaaaacccuucaaug

SEQ ID NO: 4926 - RNA, 19 nt, Artificial Sequence
  Description of Artificial Sequence: Synthetic oligonucleotide
cacagcaaaacccuucaau

SEQ ID NO: 4927 - RNA, 19 nt, Artificial Sequence
  Description of Artificial Sequence: Synthetic oligonucleotide
gcacagcaaaacccuucaa

SEQ ID NO: 4928 - RNA, 19 nt, Artificial Sequence
  Description of Artificial Sequence: Synthetic oligonucleotide
agcacagcaaaacccuuca

SEQ ID NO: 4929 - RNA, 19 nt, Artificial Sequence
  Description of Artificial Sequence: Synthetic oligonucleotide
gagcacagcaaaacccuuc

SEQ ID NO: 4930 - RNA, 19 nt, Artificial Sequence
  Description of Artificial Sequence: Synthetic oligonucleotide
cgagcacagcaaaacccuu

SEQ ID NO: 4931 - RNA, 19 nt, Artificial Sequence
  Description of Artificial Sequence: Synthetic oligonucleotide
acgagcacagcaaaacccu

SEQ ID NO: 4932 - RNA, 19 nt, Artificial Sequence
  Description of Artificial Sequence: Synthetic oligonucleotide
gacgagcacagcaaaaccc

SEQ ID NO: 4933 - RNA, 19 nt, Artificial Sequence
  Description of Artificial Sequence: Synthetic oligonucleotide
ugacgagcacagcaaaacc

SEQ ID NO: 4934 - RNA, 19 nt, Artificial Sequence
  Description of Artificial Sequence: Synthetic oligonucleotide
augacgagcacagcaaaac

SEQ ID NO: 4935 - RNA, 19 nt, Artificial Sequence
  Description of Artificial Sequence: Synthetic oligonucleotide
aaugacgagcacagcaaaa

SEQ ID NO: 4936 - RNA, 19 nt, Artificial Sequence
  Description of Artificial Sequence: Synthetic oligonucleotide
aaaugacgagcacagcaaa

SEQ ID NO: 4937 - RNA, 19 nt, Artificial Sequence
  Description of Artificial Sequence: Synthetic oligonucleotide
gaaaugacgagcacagcaa

SEQ ID NO: 4938 - RNA, 19 nt, Artificial Sequence
  Description of Artificial Sequence: Synthetic oligonucleotide
agaaaugacgagcacagca

SEQ ID NO: 4939 - RNA, 19 nt, Artificial Sequence
  Description of Artificial Sequence: Synthetic oligonucleotide
cagaaaugacgagcacagc

SEQ ID NO: 4940 - RNA, 19 nt, Artificial Sequence
  Description of Artificial Sequence: Synthetic oligonucleotide
ccagaaaugacgagcacag

SEQ ID NO: 4941 - RNA, 19 nt, Artificial Sequence
  Description of Artificial Sequence: Synthetic oligonucleotide
uccagaaaugacgagcaca

SEQ ID NO: 4942 - RNA, 19 nt, Artificial Sequence
  Description of Artificial Sequence: Synthetic oligonucleotide
guccagaaaugacgagcac

SEQ ID NO: 4943 - RNA, 19 nt, Artificial Sequence
  Description of Artificial Sequence: Synthetic oligonucleotide
gguccagaaaugacgagca

SEQ ID NO: 4944 - RNA, 19 nt, Artificial Sequence
  Description of Artificial Sequence: Synthetic oligonucleotide
ugguccagaaaugacgagc

SEQ ID NO: 4945 - RNA, 19 nt, Artificial Sequence
  Description of Artificial Sequence: Synthetic oligonucleotide
uugguccagaaaugacgag

SEQ ID NO: 4946 - RNA, 19 nt, Artificial Sequence
  Description of Artificial Sequence: Synthetic oligonucleotide
uuugguccagaaaugacga

SEQ ID NO: 4947 - RNA, 19 nt, Artificial Sequence
  Description of Artificial Sequence: Synthetic oligonucleotide
uuuugguccagaaaugacg

SEQ ID NO: 4948 - RNA, 19 nt, Artificial Sequence
  Description of Artificial Sequence: Synthetic oligonucleotide
auuuugguccagaaaugac

SEQ ID NO: 4949 - RNA, 19 nt, Artificial Sequence
  Description of Artificial Sequence: Synthetic oligonucleotide
gauuuugguccagaaauga

SEQ ID NO: 4950 - RNA, 19 nt, Artificial Sequence
  Description of Artificial Sequence: Synthetic oligonucleotide
agauuuugguccagaaaug

SEQ ID NO: 4951 - RNA, 19 nt, Artificial Sequence
  Description of Artificial Sequence: Synthetic oligonucleotide
cagauuuugguccagaaau

SEQ ID NO: 4952 - RNA, 19 nt, Artificial Sequence
  Description of Artificial Sequence: Synthetic oligonucleotide
gcagauuuugguccagaaa

SEQ ID NO: 4953 - RNA, 19 nt, Artificial Sequence
  Description of Artificial Sequence: Synthetic oligonucleotide
ugcagauuuugguccagaa

SEQ ID NO: 4954 - RNA, 19 nt, Artificial Sequence
  Description of Artificial Sequence: Synthetic oligonucleotide
uugcagauuuugguccaga

SEQ ID NO: 4955 - RNA, 19 nt, Artificial Sequence
  Description of Artificial Sequence: Synthetic oligonucleotide
uuugcagauuuugguccag

SEQ ID NO: 4956 - RNA, 19 nt, Artificial Sequence
  Description of Artificial Sequence: Synthetic oligonucleotide
guuugcagauuuuggucca

SEQ ID NO: 4957 - RNA, 19 nt, Artificial Sequence
  Description of Artificial Sequence: Synthetic oligonucleotide
gguuugcagauuuuggucc

SEQ ID NO: 4958 - RNA, 19 nt, Artificial Sequence
  Description of Artificial Sequence: Synthetic oligonucleotide
ugguuugcagauuuugguc

SEQ ID NO: 4959 - RNA, 19 nt, Artificial Sequence
  Description of Artificial Sequence: Synthetic oligonucleotide
cugguuugcagauuuuggu

SEQ ID NO: 4960 - RNA, 19 nt, Artificial Sequence
  Description of Artificial Sequence: Synthetic oligonucleotide
acugguuugcagauuuugg

SEQ ID NO: 4961 - RNA, 19 nt, Artificial Sequence
  Description of Artificial Sequence: Synthetic oligonucleotide
cacugguuugcagauuuug

SEQ ID NO: 4962 - RNA, 19 nt, Artificial Sequence
  Description of Artificial Sequence: Synthetic oligonucleotide
gcacugguuugcagauuuu

SEQ ID NO: 4963 - RNA, 19 nt, Artificial Sequence
  Description of Artificial Sequence: Synthetic oligonucleotide
agcacugguuugcagauuu

SEQ ID NO: 4964 - RNA, 19 nt, Artificial Sequence
  Description of Artificial Sequence: Synthetic oligonucleotide
gagcacugguuugcagauu

SEQ ID NO: 4965 - RNA, 19 nt, Artificial Sequence
  Description of Artificial Sequence: Synthetic oligonucleotide
ggagcacugguuugcagau

SEQ ID NO: 4966 - RNA, 19 nt, Artificial Sequence
  Description of Artificial Sequence: Synthetic oligonucleotide
uggagcacugguuugcaga

SEQ ID NO: 4967 - RNA, 19 nt, Artificial Sequence
  Description of Artificial Sequence: Synthetic oligonucleotide
auggagcacugguuugcag

SEQ ID NO: 4968 - RNA, 19 nt, Artificial Sequence
  Description of Artificial Sequence: Synthetic oligonucleotide
gauggagcacugguuugca

SEQ ID NO: 4969 - RNA, 19 nt, Artificial Sequence
  Description of Artificial Sequence: Synthetic oligonucleotide
ugauggagcacugguuugc

SEQ ID NO: 4970 - RNA, 19 nt, Artificial Sequence
  Description of Artificial Sequence: Synthetic oligonucleotide
cugauggagcacugguuug

SEQ ID NO: 4971 - RNA, 19 nt, Artificial Sequence
  Description of Artificial Sequence: Synthetic oligonucleotide
ccugauggagcacugguuu

SEQ ID NO: 4972 - RNA, 19 nt, Artificial Sequence
  Description of Artificial Sequence: Synthetic oligonucleotide
cccugauggagcacugguu

SEQ ID NO: 4973 - RNA, 19 nt, Artificial Sequence
  Description of Artificial Sequence: Synthetic oligonucleotide
ccccugauggagcacuggu

SEQ ID NO: 4974 - RNA, 19 nt, Artificial Sequence
  Description of Artificial Sequence: Synthetic oligonucleotide
cccccugauggagcacugg

SEQ ID NO: 4975 - RNA, 19 nt, Artificial Sequence
  Description of Artificial Sequence: Synthetic oligonucleotide
ucccccugauggagcacug

SEQ ID NO: 4976 - RNA, 19 nt, Artificial Sequence
  Description of Artificial Sequence: Synthetic oligonucleotide
uucccccugauggagcacu

SEQ ID NO: 4977 - RNA, 19 nt, Artificial Sequence
  Description of Artificial Sequence: Synthetic oligonucleotide
cuucccccugauggagcac

SEQ ID NO: 4978 - RNA, 19 nt, Artificial Sequence
  Description of Artificial Sequence: Synthetic oligonucleotide
acuucccccugauggagca

SEQ ID NO: 4979 - RNA, 19 nt, Artificial Sequence
  Description of Artificial Sequence: Synthetic oligonucleotide
gacuucccccugauggagc

SEQ ID NO: 4980 - RNA, 19 nt, Artificial Sequence
  Description of Artificial Sequence: Synthetic oligonucleotide
agacuucccccugauggag

SEQ ID NO: 4981 - RNA, 19 nt, Artificial Sequence
  Description of Artificial Sequence: Synthetic oligonucleotide
cagacuucccccugaugga

SEQ ID NO: 4982 - RNA, 19 nt, Artificial Sequence
  Description of Artificial Sequence: Synthetic oligonucleotide
acagacuucccccugaugg

SEQ ID NO: 4983 - RNA, 19 nt, Artificial Sequence
  Description of Artificial Sequence: Synthetic oligonucleotide
uacagacuucccccugaug

SEQ ID NO: 4984 - RNA, 19 nt, Artificial Sequence
  Description of Artificial Sequence: Synthetic oligonucleotide
guacagacuucccccugau

SEQ ID NO: 4985 - RNA, 19 nt, Artificial Sequence
  Description of Artificial Sequence: Synthetic oligonucleotide
gguacagacuucccccuga

SEQ ID NO: 4986 - RNA, 19 nt, Artificial Sequence
  Description of Artificial Sequence: Synthetic oligonucleotide
ugguacagacuucccccug

SEQ ID NO: 4987 - RNA, 19 nt, Artificial Sequence
  Description of Artificial Sequence: Synthetic oligonucleotide
uugguacagacuucccccu

SEQ ID NO: 4988 - RNA, 19 nt, Artificial Sequence
  Description of Artificial Sequence: Synthetic oligonucleotide
uuugguacagacuuccccc

SEQ ID NO: 4989 - RNA, 19 nt, Artificial Sequence
  Description of Artificial Sequence: Synthetic oligonucleotide
guuugguacagacuucccc

SEQ ID NO: 4990 - RNA, 19 nt, Artificial Sequence
  Description of Artificial Sequence: Synthetic oligonucleotide
uguuugguacagacuuccc

SEQ ID NO: 4991 - RNA, 19 nt, Artificial Sequence
  Description of Artificial Sequence: Synthetic oligonucleotide
uuguuugguacagacuucc

SEQ ID NO: 4992 - RNA, 19 nt, Artificial Sequence
  Description of Artificial Sequence: Synthetic oligonucleotide
guuguuugguacagacuuc

SEQ ID NO: 4993 - RNA, 19 nt, Artificial Sequence
  Description of Artificial Sequence: Synthetic oligonucleotide
cguuguuugguacagacuu

SEQ ID NO: 4994 - RNA, 19 nt, Artificial Sequence
  Description of Artificial Sequence: Synthetic oligonucleotide
gcguuguuugguacagacu

SEQ ID NO: 4995 - RNA, 19 nt, Artificial Sequence
  Description of Artificial Sequence: Synthetic oligonucleotide
ugcguuguuugguacagac

SEQ ID NO: 4996 - RNA, 19 nt, Artificial Sequence
  Description of Artificial Sequence: Synthetic oligonucleotide
uugcguuguuugguacaga

SEQ ID NO: 4997 - RNA, 19 nt, Artificial Sequence
  Description of Artificial Sequence: Synthetic oligonucleotide
cuugcguuguuugguacag

SEQ ID NO: 4998 - RNA, 19 nt, Artificial Sequence
  Description of Artificial Sequence: Synthetic oligonucleotide
ucuugcguuguuugguaca

SEQ ID NO: 4999 - RNA, 19 nt, Artificial Sequence
  Description of Artificial Sequence: Synthetic oligonucleotide
uucuugcguuguuugguac

SEQ ID NO: 5000 - RNA, 19 nt, Artificial Sequence
  Description of Artificial Sequence: Synthetic oligonucleotide
cuucuugcguuguuuggua

SEQ ID NO: 5001 - RNA, 19 nt, Artificial Sequence
  Description of Artificial Sequence: Synthetic oligonucleotide
ccuucuugcguuguuuggu

SEQ ID NO: 5002 - RNA, 19 nt, Artificial Sequence
  Description of Artificial Sequence: Synthetic oligonucleotide
cccuucuugcguuguuugg

SEQ ID NO: 5003 - RNA, 19 nt, Artificial Sequence
  Description of Artificial Sequence: Synthetic oligonucleotide
acccuucuugcguuguuug

SEQ ID NO: 5004 - RNA, 19 nt, Artificial Sequence
  Description of Artificial Sequence: Synthetic oligonucleotide
aacccuucuugcguuguuu

SEQ ID NO: 5005 - RNA, 19 nt, Artificial Sequence
  Description of Artificial Sequence: Synthetic oligonucleotide
gaacccuucuugcguuguu

SEQ ID NO: 5006 - RNA, 19 nt, Artificial Sequence
  Description of Artificial Sequence: Synthetic oligonucleotide
agaacccuucuugcguugu

SEQ ID NO: 5007 - RNA, 19 nt, Artificial Sequence
  Description of Artificial Sequence: Synthetic oligonucleotide
gagaacccuucuugcguug

SEQ ID NO: 5008 - RNA, 19 nt, Artificial Sequence
  Description of Artificial Sequence: Synthetic oligonucleotide
ugagaacccuucuugcguu

SEQ ID NO: 5009 - RNA, 19 nt, Artificial Sequence
  Description of Artificial Sequence: Synthetic oligonucleotide
augagaacccuucuugcgu

SEQ ID NO: 5010 - RNA, 19 nt, Artificial Sequence
  Description of Artificial Sequence: Synthetic oligonucleotide
caugagaacccuucuugcg

SEQ ID NO: 5011 - RNA, 19 nt, Artificial Sequence
  Description of Artificial Sequence: Synthetic oligonucleotide
ccaugagaacccuucuugc

SEQ ID NO: 5012 - RNA, 19 nt, Artificial Sequence
  Description of Artificial Sequence: Synthetic oligonucleotide
cccaugagaacccuucuug

SEQ ID NO: 5013 - RNA, 19 nt, Artificial Sequence
  Description of Artificial Sequence: Synthetic oligonucleotide
gcccaugagaacccuucuu

SEQ ID NO: 5014 - RNA, 19 nt, Artificial Sequence
  Description of Artificial Sequence: Synthetic oligonucleotide
agcccaugagaacccuucu

SEQ ID NO: 5015 - RNA, 19 nt, Artificial Sequence
  Description of Artificial Sequence: Synthetic oligonucleotide
cagcccaugagaacccuuc

SEQ ID NO: 5016 - RNA, 19 nt, Artificial Sequence
  Description of Artificial Sequence: Synthetic oligonucleotide
ccagcccaugagaacccuu

SEQ ID NO: 5017 - RNA, 19 nt, Artificial Sequence
  Description of Artificial Sequence: Synthetic oligonucleotide
uccagcccaugagaacccu

SEQ ID NO: 5018 - RNA, 19 nt, Artificial Sequence
  Description of Artificial Sequence: Synthetic oligonucleotide
uuccagcccaugagaaccc

SEQ ID NO: 5019 - RNA, 19 nt, Artificial Sequence
  Description of Artificial Sequence: Synthetic oligonucleotide
uuuccagcccaugagaacc

SEQ ID NO: 5020 - RNA, 19 nt, Artificial Sequence
  Description of Artificial Sequence: Synthetic oligonucleotide
auuuccagcccaugagaac

SEQ ID NO: 5021 - RNA, 19 nt, Artificial Sequence
  Description of Artificial Sequence: Synthetic oligonucleotide
aauuuccagcccaugagaa

SEQ ID NO: 5022 - RNA, 19 nt, Artificial Sequence
  Description of Artificial Sequence: Synthetic oligonucleotide
aaauuuccagcccaugaga

SEQ ID NO: 5023 - RNA, 19 nt, Artificial Sequence
  Description of Artificial Sequence: Synthetic oligonucleotide
aaaauuuccagcccaugag

SEQ ID NO: 5024 - RNA, 19 nt, Artificial Sequence
  Description of Artificial Sequence: Synthetic oligonucleotide
gaaaauuuccagcccauga

SEQ ID NO: 5025 - RNA, 19 nt, Artificial Sequence
  Description of Artificial Sequence: Synthetic oligonucleotide
ggaaaauuuccagcccaug

SEQ ID NO: 5026 - RNA, 19 nt, Artificial Sequence
  Description of Artificial Sequence: Synthetic oligonucleotide
uggaaaauuuccagcccau

SEQ ID NO: 5027 - RNA, 19 nt, Artificial Sequence
  Description of Artificial Sequence: Synthetic oligonucleotide
cuggaaaauuuccagccca

SEQ ID NO: 5028 - RNA, 19 nt, Artificial Sequence
  Description of Artificial Sequence: Synthetic oligonucleotide
gcuggaaaauuuccagccc

SEQ ID NO: 5029 - RNA, 19 nt, Artificial Sequence
  Description of Artificial Sequence: Synthetic oligonucleotide
cgcuggaaaauuuccagcc

SEQ ID NO: 5030 - RNA, 19 nt, Artificial Sequence
  Description of Artificial Sequence: Synthetic oligonucleotide
acgcuggaaaauuuccagc

SEQ ID NO: 5031 - RNA, 19 nt, Artificial Sequence
  Description of Artificial Sequence: Synthetic oligonucleotide
aacgcuggaaaauuuccag

SEQ ID NO: 5032 - RNA, 19 nt, Artificial Sequence
  Description of Artificial Sequence: Synthetic oligonucleotide
caacgcuggaaaauuucca

SEQ ID NO: 5033 - RNA, 19 nt, Artificial Sequence
  Description of Artificial Sequence: Synthetic oligonucleotide
gcaacgcuggaaaauuucc

SEQ ID NO: 5034 - RNA, 19 nt, Artificial Sequence
  Description of Artificial Sequence: Synthetic oligonucleotide
cgcaacgcuggaaaauuuc

SEQ ID NO: 5035 - RNA, 19 nt, Artificial Sequence
  Description of Artificial Sequence: Synthetic oligonucleotide
ucgcaacgcuggaaaauuu

SEQ ID NO: 5036 - RNA, 19 nt, Artificial Sequence
  Description of Artificial Sequence: Synthetic oligonucleotide
gucgcaacgcuggaaaauu

SEQ ID NO: 5037 - RNA, 19 nt, Artificial Sequence
  Description of Artificial Sequence: Synthetic oligonucleotide
agucgcaacgcuggaaaau

SEQ ID NO: 5038 - RNA, 19 nt, Artificial Sequence
  Description of Artificial Sequence: Synthetic oligonucleotide
cagucgcaacgcuggaaaa

SEQ ID NO: 5039 - RNA, 19 nt, Artificial Sequence
  Description of Artificial Sequence: Synthetic oligonucleotide
acagucgcaacgcuggaaa

SEQ ID NO: 5040 - RNA, 19 nt, Artificial Sequence
  Description of Artificial Sequence: Synthetic oligonucleotide
cacagucgcaacgcuggaa

SEQ ID NO: 5041 - RNA, 19 nt, Artificial Sequence
  Description of Artificial Sequence: Synthetic oligonucleotide
gcacagucgcaacgcugga

SEQ ID NO: 5042 - RNA, 19 nt, Artificial Sequence
  Description of Artificial Sequence: Synthetic oligonucleotide
cgcacagucgcaacgcugg

SEQ ID NO: 5043 - RNA, 19 nt, Artificial Sequence
  Description of Artificial Sequence: Synthetic oligonucleotide
ucgcacagucgcaacgcug

SEQ ID NO: 5044 - RNA, 19 nt, Artificial Sequence
  Description of Artificial Sequence: Synthetic oligonucleotide
uucgcacagucgcaacgcu

SEQ ID NO: 5045 - RNA, 19 nt, Artificial Sequence
  Description of Artificial Sequence: Synthetic oligonucleotide
cuucgcacagucgcaacgc

SEQ ID NO: 5046 - RNA, 19 nt, Artificial Sequence
  Description of Artificial Sequence: Synthetic oligonucleotide
ccuucgcacagucgcaacg

SEQ ID NO: 5047 - RNA, 19 nt, Artificial Sequence
  Description of Artificial Sequence: Synthetic oligonucleotide
cccuucgcacagucgcaac

SEQ ID NO: 5048 - RNA, 19 nt, Artificial Sequence
  Description of Artificial Sequence: Synthetic oligonucleotide
gcccuucgcacagucgcaa

SEQ ID NO: 5049 - RNA, 19 nt, Artificial Sequence
  Description of Artificial Sequence: Synthetic oligonucleotide
ggcccuucgcacagucgca

SEQ ID NO: 5050 - RNA, 19 nt, Artificial Sequence
  Description of Artificial Sequence: Synthetic oligonucleotide
aggcccuucgcacagucgc

SEQ ID NO: 5051 - RNA, 19 nt, Artificial Sequence
  Description of Artificial Sequence: Synthetic oligonucleotide
caggcccuucgcacagucg

SEQ ID NO: 5052 - RNA, 19 nt, Artificial Sequence
  Description of Artificial Sequence: Synthetic oligonucleotide
acaggcccuucgcacaguc

SEQ ID NO: 5053 - RNA, 19 nt, Artificial Sequence
  Description of Artificial Sequence: Synthetic oligonucleotide
gacaggcccuucgcacagu

SEQ ID NO: 5054 - RNA, 19 nt, Artificial Sequence
  Description of Artificial Sequence: Synthetic oligonucleotide
agacaggcccuucgcacag

SEQ ID NO: 5055 - RNA, 19 nt, Artificial Sequence
  Description of Artificial Sequence: Synthetic oligonucleotide
aagacaggcccuucgcaca

SEQ ID NO: 5056 - RNA, 19 nt, Artificial Sequence
  Description of Artificial Sequence: Synthetic oligonucleotide
caagacaggcccuucgcac

SEQ ID NO: 5057 - RNA, 19 nt, Artificial Sequence
  Description of Artificial Sequence: Synthetic oligonucleotide
gcaagacaggcccuucgca

SEQ ID NO: 5058 - RNA, 19 nt, Artificial Sequence
  Description of Artificial Sequence: Synthetic oligonucleotide
ugcaagacaggcccuucgc

SEQ ID NO: 5059 - RNA, 19 nt, Artificial Sequence
  Description of Artificial Sequence: Synthetic oligonucleotide
uugcaagacaggcccuucg

SEQ ID NO: 5060 - RNA, 19 nt, Artificial Sequence
  Description of Artificial Sequence: Synthetic oligonucleotide
uuugcaagacaggcccuuc

SEQ ID NO: 5061 - RNA, 19 nt, Artificial Sequence
  Description of Artificial Sequence: Synthetic oligonucleotide
cuuugcaagacaggcccuu

SEQ ID NO: 5062 - RNA, 19 nt, Artificial Sequence
  Description of Artificial Sequence: Synthetic oligonucleotide
acuuugcaagacaggcccu

SEQ ID NO: 5063 - RNA, 19 nt, Artificial Sequence
  Description of Artificial Sequence: Synthetic oligonucleotide
uacuuugcaagacaggccc

SEQ ID NO: 5064 - RNA, 19 nt, Artificial Sequence
  Description of Artificial Sequence: Synthetic oligonucleotide
auacuuugcaagacaggcc

SEQ ID NO: 5065 - RNA, 19 nt, Artificial Sequence
  Description of Artificial Sequence: Synthetic oligonucleotide
cauacuuugcaagacaggc

SEQ ID NO: 5066 - RNA, 19 nt, Artificial Sequence
  Description of Artificial Sequence: Synthetic oligonucleotide
ccauacuuugcaagacagg

SEQ ID NO: 5067 - RNA, 19 nt, Artificial Sequence
  Description of Artificial Sequence: Synthetic oligonucleotide
uccauacuuugcaagacag

SEQ ID NO: 5068 - RNA, 19 nt, Artificial Sequence
  Description of Artificial Sequence: Synthetic oligonucleotide
uuccauacuuugcaagaca

SEQ ID NO: 5069 - RNA, 19 nt, Artificial Sequence
  Description of Artificial Sequence: Synthetic oligonucleotide
uuuccauacuuugcaagac

SEQ ID NO: 5070 - RNA, 19 nt, Artificial Sequence
  Description of Artificial Sequence: Synthetic oligonucleotide
cuuuccauacuuugcaaga

SEQ ID NO: 5071 - RNA, 19 nt, Artificial Sequence
  Description of Artificial Sequence: Synthetic oligonucleotide
ucuuuccauacuuugcaag

SEQ ID NO: 5072 - RNA, 19 nt, Artificial Sequence
  Description of Artificial Sequence: Synthetic oligonucleotide
aucuuuccauacuuugcaa

SEQ ID NO: 5073 - RNA, 19 nt, Artificial Sequence
  Description of Artificial Sequence: Synthetic oligonucleotide
caucuuuccauacuuugca

SEQ ID NO: 5074 - RNA, 19 nt, Artificial Sequence
  Description of Artificial Sequence: Synthetic oligonucleotide
gcaucuuuccauacuuugc

SEQ ID NO: 5075 - RNA, 19 nt, Artificial Sequence
  Description of Artificial Sequence: Synthetic oligonucleotide
ggcaucuuuccauacuuug

SEQ ID NO: 5076 - RNA, 19 nt, Artificial Sequence
  Description of Artificial Sequence: Synthetic oligonucleotide
uggcaucuuuccauacuuu

SEQ ID NO: 5077 - RNA, 19 nt, Artificial Sequence
  Description of Artificial Sequence: Synthetic oligonucleotide
guggcaucuuuccauacuu

SEQ ID NO: 5078 - RNA, 19 nt, Artificial Sequence
  Description of Artificial Sequence: Synthetic oligonucleotide
gguggcaucuuuccauacu

SEQ ID NO: 5079 - RNA, 19 nt, Artificial Sequence
  Description of Artificial Sequence: Synthetic oligonucleotide
agguggcaucuuuccauac

SEQ ID NO: 5080 - RNA, 19 nt, Artificial Sequence
  Description of Artificial Sequence: Synthetic oligonucleotide
uagguggcaucuuuccaua

SEQ ID NO: 5081 - RNA, 19 nt, Artificial Sequence
  Description of Artificial Sequence: Synthetic oligonucleotide
guagguggcaucuuuccau

SEQ ID NO: 5082 - RNA, 19 nt, Artificial Sequence
  Description of Artificial Sequence: Synthetic oligonucleotide
aguagguggcaucuuucca

SEQ ID NO: 5083 - RNA, 19 nt, Artificial Sequence
  Description of Artificial Sequence: Synthetic oligonucleotide
gaguagguggcaucuuucc

SEQ ID NO: 5084 - RNA, 19 nt, Artificial Sequence
  Description of Artificial Sequence: Synthetic oligonucleotide
ggaguagguggcaucuuuc

SEQ ID NO: 5085 - RNA, 19 nt, Artificial Sequence
  Description of Artificial Sequence: Synthetic oligonucleotide
aggaguagguggcaucuuu

SEQ ID NO: 5086 - RNA, 19 nt, Artificial Sequence
  Description of Artificial Sequence: Synthetic oligonucleotide
gaggaguagguggcaucuu

SEQ ID NO: 5087 - RNA, 19 nt, Artificial Sequence
  Description of Artificial Sequence: Synthetic oligonucleotide
ggaggaguagguggcaucu

SEQ ID NO: 5088 - RNA, 19 nt, Artificial Sequence
  Description of Artificial Sequence: Synthetic oligonucleotide
uggaggaguagguggcauc

SEQ ID NO: 5089 - RNA, 19 nt, Artificial Sequence
  Description of Artificial Sequence: Synthetic oligonucleotide
uuggaggaguagguggcau

SEQ ID NO: 5090 - RNA, 19 nt, Artificial Sequence
  Description of Artificial Sequence: Synthetic oligonucleotide
uuuggaggaguagguggca

SEQ ID NO: 5091 - RNA, 19 nt, Artificial Sequence
  Description of Artificial Sequence: Synthetic oligonucleotide
cuuuggaggaguagguggc

SEQ ID NO: 5092 - RNA, 19 nt, Artificial Sequence
  Description of Artificial Sequence: Synthetic oligonucleotide
gcuuuggaggaguaggugg

SEQ ID NO: 5093 - RNA, 19 nt, Artificial Sequence
  Description of Artificial Sequence: Synthetic oligonucleotide
ggcuuuggaggaguaggug

SEQ ID NO: 5094 - RNA, 19 nt, Artificial Sequence
  Description of Artificial Sequence: Synthetic oligonucleotide
uggcuuuggaggaguaggu

SEQ ID NO: 5095 - RNA, 19 nt, Artificial Sequence
  Description of Artificial Sequence: Synthetic oligonucleotide
cuggcuuuggaggaguagg

SEQ ID NO: 5096 - RNA, 19 nt, Artificial Sequence
  Description of Artificial Sequence: Synthetic oligonucleotide
ucuggcuuuggaggaguag

SEQ ID NO: 5097 - RNA, 19 nt, Artificial Sequence
  Description of Artificial Sequence: Synthetic oligonucleotide
gucuggcuuuggaggagua

SEQ ID NO: 5098 - RNA, 19 nt, Artificial Sequence
  Description of Artificial Sequence: Synthetic oligonucleotide
agucuggcuuuggaggagu

SEQ ID NO: 5099 - RNA, 19 nt, Artificial Sequence
  Description of Artificial Sequence: Synthetic oligonucleotide
gagucuggcuuuggaggag

SEQ ID NO: 5100 - RNA, 19 nt, Artificial Sequence
  Description of Artificial Sequence: Synthetic oligonucleotide
ggagucuggcuuuggagga

SEQ ID NO: 5101 - RNA, 19 nt, Artificial Sequence
  Description of Artificial Sequence: Synthetic oligonucleotide
uggagucuggcuuuggagg

SEQ ID NO: 5102 - RNA, 19 nt, Artificial Sequence
  Description of Artificial Sequence: Synthetic oligonucleotide
auggagucuggcuuuggag

SEQ ID NO: 5103 - RNA, 19 nt, Artificial Sequence
  Description of Artificial Sequence: Synthetic oligonucleotide
cauggagucuggcuuugga

SEQ ID NO: 5104 - RNA, 19 nt, Artificial Sequence
  Description of Artificial Sequence: Synthetic oligonucleotide
acauggagucuggcuuugg

SEQ ID NO: 5105 - RNA, 19 nt, Artificial Sequence
  Description of Artificial Sequence: Synthetic oligonucleotide
cacauggagucuggcuuug

SEQ ID NO: 5106 - RNA, 19 nt, Artificial Sequence
  Description of Artificial Sequence: Synthetic oligonucleotide
acacauggagucuggcuuu

SEQ ID NO: 5107 - RNA, 19 nt, Artificial Sequence
  Description of Artificial Sequence: Synthetic oligonucleotide
cacacauggagucuggcuu

SEQ ID NO: 5108 - RNA, 19 nt, Artificial Sequence
  Description of Artificial Sequence: Synthetic oligonucleotide
acacacauggagucuggcu

SEQ ID NO: 5109 - RNA, 19 nt, Artificial Sequence
  Description of Artificial Sequence: Synthetic oligonucleotide
gacacacauggagucuggc

SEQ ID NO: 5110 - RNA, 19 nt, Artificial Sequence
  Description of Artificial Sequence: Synthetic oligonucleotide
ugacacacauggagucugg

SEQ ID NO: 5111 - RNA, 19 nt, Artificial Sequence
  Description of Artificial Sequence: Synthetic oligonucleotide
cugacacacauggagucug

SEQ ID NO: 5112 - RNA, 19 nt, Artificial Sequence
  Description of Artificial Sequence: Synthetic oligonucleotide
ucugacacacauggagucu

SEQ ID NO: 5113 - RNA, 19 nt, Artificial Sequence
  Description of Artificial Sequence: Synthetic oligonucleotide
uucugacacacauggaguc

SEQ ID NO: 5114 - RNA, 19 nt, Artificial Sequence
  Description of Artificial Sequence: Synthetic oligonucleotide
uuucugacacacauggagu

SEQ ID NO: 5115 - RNA, 19 nt, Artificial Sequence
  Description of Artificial Sequence: Synthetic oligonucleotide
uuuucugacacacauggag

SEQ ID NO: 5116 - RNA, 19 nt, Artificial Sequence
  Description of Artificial Sequence: Synthetic oligonucleotide
auuuucugacacacaugga

SEQ ID NO: 5117 - RNA, 19 nt, Artificial Sequence
  Description of Artificial Sequence: Synthetic oligonucleotide
aauuuucugacacacaugg

SEQ ID NO: 5118 - RNA, 19 nt, Artificial Sequence
  Description of Artificial Sequence: Synthetic oligonucleotide
aaauuuucugacacacaug

SEQ ID NO: 5119 - RNA, 19 nt, Artificial Sequence
  Description of Artificial Sequence: Synthetic oligonucleotide
caaauuuucugacacacau

SEQ ID NO: 5120 - RNA, 19 nt, Artificial Sequence
  Description of Artificial Sequence: Synthetic oligonucleotide
ucaaauuuucugacacaca

SEQ ID NO: 5121 - RNA, 19 nt, Artificial Sequence
  Description of Artificial Sequence: Synthetic oligonucleotide
aucaaauuuucugacacac

SEQ ID NO: 5122 - RNA, 19 nt, Artificial Sequence
  Description of Artificial Sequence: Synthetic oligonucleotide
gaucaaauuuucugacaca

SEQ ID NO: 5123 - RNA, 19 nt, Artificial Sequence
  Description of Artificial Sequence: Synthetic oligonucleotide
ugaucaaauuuucugacac

SEQ ID NO: 5124 - RNA, 19 nt, Artificial Sequence
  Description of Artificial Sequence: Synthetic oligonucleotide
gugaucaaauuuucugaca

SEQ ID NO: 5125 - RNA, 19 nt, Artificial Sequence
  Description of Artificial Sequence: Synthetic oligonucleotide
ggugaucaaauuuucugac

SEQ ID NO: 5126 - RNA, 19 nt, Artificial Sequence
  Description of Artificial Sequence: Synthetic oligonucleotide
uggugaucaaauuuucuga

SEQ ID NO: 5127 - RNA, 19 nt, Artificial Sequence
  Description of Artificial Sequence: Synthetic oligonucleotide
auggugaucaaauuuucug

SEQ ID NO: 5128 - RNA, 19 nt, Artificial Sequence
  Description of Artificial Sequence: Synthetic oligonucleotide
aauggugaucaaauuuucu

SEQ ID NO: 5129 - RNA, 19 nt, Artificial Sequence
  Description of Artificial Sequence: Synthetic oligonucleotide
caauggugaucaaauuuuc

SEQ ID NO: 5130 - RNA, 19 nt, Artificial Sequence
  Description of Artificial Sequence: Synthetic oligonucleotide
ucaauggugaucaaauuuu

SEQ ID NO: 5131 - RNA, 19 nt, Artificial Sequence
  Description of Artificial Sequence: Synthetic oligonucleotide
cucaauggugaucaaauuu

SEQ ID NO: 5132 - RNA, 19 nt, Artificial Sequence
  Description of Artificial Sequence: Synthetic oligonucleotide
ccucaauggugaucaaauu

SEQ ID NO: 5133 - RNA, 19 nt, Artificial Sequence
  Description of Artificial Sequence: Synthetic oligonucleotide
uccucaauggugaucaaau

SEQ ID NO: 5134 - RNA, 19 nt, Artificial Sequence
  Description of Artificial Sequence: Synthetic oligonucleotide
uuccucaauggugaucaaa

SEQ ID NO: 5135 - RNA, 19 nt, Artificial Sequence
  Description of Artificial Sequence: Synthetic oligonucleotide
guuccucaauggugaucaa

SEQ ID NO: 5136 - RNA, 19 nt, Artificial Sequence
  Description of Artificial Sequence: Synthetic oligonucleotide
uguuccucaauggugauca

SEQ ID NO: 5137 - RNA, 19 nt, Artificial Sequence
  Description of Artificial Sequence: Synthetic oligonucleotide
auguuccucaauggugauc

SEQ ID NO: 5138 - RNA, 19 nt, Artificial Sequence
  Description of Artificial Sequence: Synthetic oligonucleotide
gauguuccucaauggugau

SEQ ID NO: 5139 - RNA, 19 nt, Artificial Sequence
  Description of Artificial Sequence: Synthetic oligonucleotide
ugauguuccucaaugguga

SEQ ID NO: 5140 - RNA, 19 nt, Artificial Sequence
  Description of Artificial Sequence: Synthetic oligonucleotide
augauguuccucaauggug

SEQ ID NO: 5141 - RNA, 19 nt, Artificial Sequence
  Description of Artificial Sequence: Synthetic oligonucleotide
gaugauguuccucaauggu

SEQ ID NO: 5142 - RNA, 19 nt, Artificial Sequence
  Description of Artificial Sequence: Synthetic oligonucleotide
ugaugauguuccucaaugg

SEQ ID NO: 5143 - RNA, 19 nt, Artificial Sequence
  Description of Artificial Sequence: Synthetic oligonucleotide
uugaugauguuccucaaug

SEQ ID NO: 5144 - RNA, 19 nt, Artificial Sequence
  Description of Artificial Sequence: Synthetic oligonucleotide
auugaugauguuccucaau

SEQ ID NO: 5145 - RNA, 19 nt, Artificial Sequence
  Description of Artificial Sequence: Synthetic oligonucleotide
aauugaugauguuccucaa

SEQ ID NO: 5146 - RNA, 19 nt, Artificial Sequence
  Description of Artificial Sequence: Synthetic oligonucleotide
caauugaugauguuccuca

SEQ ID NO: 5147 - RNA, 19 nt, Artificial Sequence
  Description of Artificial Sequence: Synthetic oligonucleotide
gcaauugaugauguuccuc

SEQ ID NO: 5148 - RNA, 19 nt, Artificial Sequence
  Description of Artificial Sequence: Synthetic oligonucleotide
ugcaauugaugauguuccu

SEQ ID NO: 5149 - RNA, 19 nt, Artificial Sequence
  Description of Artificial Sequence: Synthetic oligonucleotide
cugcaauugaugauguucc

SEQ ID NO: 5150 - RNA, 19 nt, Artificial Sequence
  Description of Artificial Sequence: Synthetic oligonucleotide
ucugcaauugaugauguuc

SEQ ID NO: 5151 - RNA, 19 nt, Artificial Sequence
  Description of Artificial Sequence: Synthetic oligonucleotide
gucugcaauugaugauguu

SEQ ID NO: 5152 - RNA, 19 nt, Artificial Sequence
  Description of Artificial Sequence: Synthetic oligonucleotide
agucugcaauugaugaugu

SEQ ID NO: 5153 - RNA, 19 nt, Artificial Sequence
  Description of Artificial Sequence: Synthetic oligonucleotide
cagucugcaauugaugaug

SEQ ID NO: 5154 - RNA, 19 nt, Artificial Sequence
  Description of Artificial Sequence: Synthetic oligonucleotide
acagucugcaauugaugau

SEQ ID NO: 5155 - RNA, 19 nt, Artificial Sequence
  Description of Artificial Sequence: Synthetic oligonucleotide
cacagucugcaauugauga

SEQ ID NO: 5156 - RNA, 19 nt, Artificial Sequence
  Description of Artificial Sequence: Synthetic oligonucleotide
ucacagucugcaauugaug

SEQ ID NO: 5157 - RNA, 19 nt, Artificial Sequence
  Description of Artificial Sequence: Synthetic oligonucleotide
uucacagucugcaauugau

SEQ ID NO: 5158 - RNA, 19 nt, Artificial Sequence
  Description of Artificial Sequence: Synthetic oligonucleotide
cuucacagucugcaauuga

SEQ ID NO: 5159 - RNA, 19 nt, Artificial Sequence
  Description of Artificial Sequence: Synthetic oligonucleotide
acuucacagucugcaauug

SEQ ID NO: 5160 - RNA, 19 nt, Artificial Sequence
  Description of Artificial Sequence: Synthetic oligonucleotide
aacuucacagucugcaauu

SEQ ID NO: 5161 - RNA, 19 nt, Artificial Sequence
  Description of Artificial Sequence: Synthetic oligonucleotide
caacuucacagucugcaau

SEQ ID NO: 5162 - RNA, 19 nt, Artificial Sequence
  Description of Artificial Sequence: Synthetic oligonucleotide
acaacuucacagucugcaa

SEQ ID NO: 5163 - RNA, 19 nt, Artificial Sequence
  Description of Artificial Sequence: Synthetic oligonucleotide
cacaacuucacagucugca

SEQ ID NO: 5164 - RNA, 19 nt, Artificial Sequence
  Description of Artificial Sequence: Synthetic oligonucleotide
acacaacuucacagucugc

SEQ ID NO: 5165 - RNA, 19 nt, Artificial Sequence
  Description of Artificial Sequence: Synthetic oligonucleotide
uacacaacuucacagucug

SEQ ID NO: 5166 - RNA, 19 nt, Artificial Sequence
  Description of Artificial Sequence: Synthetic oligonucleotide
auacacaacuucacagucu

SEQ ID NO: 5167 - RNA, 19 nt, Artificial Sequence
  Description of Artificial Sequence: Synthetic oligonucleotide
aauacacaacuucacaguc

SEQ ID NO: 5168 - RNA, 19 nt, Artificial Sequence
  Description of Artificial Sequence: Synthetic oligonucleotide
aaauacacaacuucacagu

SEQ ID NO: 5169 - RNA, 19 nt, Artificial Sequence
  Description of Artificial Sequence: Synthetic oligonucleotide
uaaauacacaacuucacag

SEQ ID NO: 5170 - RNA, 19 nt, Artificial Sequence
  Description of Artificial Sequence: Synthetic oligonucleotide
uuaaauacacaacuucaca

SEQ ID NO: 5171 - RNA, 19 nt, Artificial Sequence
  Description of Artificial Sequence: Synthetic oligonucleotide
auuaaauacacaacuucac

SEQ ID NO: 5172 - RNA, 19 nt, Artificial Sequence
  Description of Artificial Sequence: Synthetic oligonucleotide
cauuaaauacacaacuuca

SEQ ID NO: 5173 - RNA, 19 nt, Artificial Sequence
  Description of Artificial Sequence: Synthetic oligonucleotide
gcauuaaauacacaacuuc

SEQ ID NO: 5174 - RNA, 19 nt, Artificial Sequence
  Description of Artificial Sequence: Synthetic oligonucleotide
ugcauuaaauacacaacuu

SEQ ID NO: 5175 - RNA, 19 nt, Artificial Sequence
  Description of Artificial Sequence: Synthetic oligonucleotide
augcauuaaauacacaacu

SEQ ID NO: 5176 - RNA, 19 nt, Artificial Sequence
  Description of Artificial Sequence: Synthetic oligonucleotide
aaugcauuaaauacacaac

SEQ ID NO: 5177 - RNA, 19 nt, Artificial Sequence
  Description of Artificial Sequence: Synthetic oligonucleotide
uaaugcauuaaauacacaa

SEQ ID NO: 5178 - RNA, 19 nt, Artificial Sequence
  Description of Artificial Sequence: Synthetic oligonucleotide
auaaugcauuaaauacaca

SEQ ID NO: 5179 - RNA, 19 nt, Artificial Sequence
  Description of Artificial Sequence: Synthetic oligonucleotide
uauaaugcauuaaauacac

SEQ ID NO: 5180 - RNA, 19 nt, Artificial Sequence
  Description of Artificial Sequence: Synthetic oligonucleotide
cuauaaugcauuaaauaca

SEQ ID NO: 5181 - RNA, 19 nt, Artificial Sequence
  Description of Artificial Sequence: Synthetic oligonucleotide
gcuauaaugcauuaaauac

SEQ ID NO: 5182 - RNA, 19 nt, Artificial Sequence
  Description of Artificial Sequence: Synthetic oligonucleotide
ugcuauaaugcauuaaaua

SEQ ID NO: 5183 - RNA, 19 nt, Artificial Sequence
  Description of Artificial Sequence: Synthetic oligonucleotide
augcuauaaugcauuaaau

SEQ ID NO: 5184 - RNA, 19 nt, Artificial Sequence
  Description of Artificial Sequence: Synthetic oligonucleotide
caugcuauaaugcauuaaa

SEQ ID NO: 5185 - RNA, 19 nt, Artificial Sequence
  Description of Artificial Sequence: Synthetic oligonucleotide
ccaugcuauaaugcauuaa

SEQ ID NO: 5186 - RNA, 19 nt, Artificial Sequence
  Description of Artificial Sequence: Synthetic oligonucleotide
accaugcuauaaugcauua

SEQ ID NO: 5187 - RNA, 19 nt, Artificial Sequence
  Description of Artificial Sequence: Synthetic oligonucleotide
caccaugcuauaaugcauu

SEQ ID NO: 5188 - RNA, 19 nt, Artificial Sequence
  Description of Artificial Sequence: Synthetic oligonucleotide
ccaccaugcuauaaugcau

SEQ ID NO: 5189 - RNA, 19 nt, Artificial Sequence
  Description of Artificial Sequence: Synthetic oligonucleotide
uccaccaugcuauaaugca

SEQ ID NO: 5190 - RNA, 19 nt, Artificial Sequence
  Description of Artificial Sequence: Synthetic oligonucleotide
uuccaccaugcuauaaugc

SEQ ID NO: 5191 - RNA, 19 nt, Artificial Sequence
  Description of Artificial Sequence: Synthetic oligonucleotide
uuuccaccaugcuauaaug

SEQ ID NO: 5192 - RNA, 19 nt, Artificial Sequence
  Description of Artificial Sequence: Synthetic oligonucleotide
uuuuccaccaugcuauaau

SEQ ID NO: 5193 - RNA, 19 nt, Artificial Sequence
  Description of Artificial Sequence: Synthetic oligonucleotide
auuuuccaccaugcuauaa

SEQ ID NO: 5194 - RNA, 19 nt, Artificial Sequence
  Description of Artificial Sequence: Synthetic oligonucleotide
uauuuuccaccaugcuaua

SEQ ID NO: 5195 - RNA, 19 nt, Artificial Sequence
  Description of Artificial Sequence: Synthetic oligonucleotide
uuauuuuccaccaugcuau

SEQ ID NO: 5196 - RNA, 19 nt, Artificial Sequence
  Description of Artificial Sequence: Synthetic oligonucleotide
cuuauuuuccaccaugcua

SEQ ID NO: 5197 - RNA, 19 nt, Artificial Sequence
  Description of Artificial Sequence: Synthetic oligonucleotide
ccuuauuuuccaccaugcu

SEQ ID NO: 5198 - RNA, 19 nt, Artificial Sequence
  Description of Artificial Sequence: Synthetic oligonucleotide
accuuauuuuccaccaugc

SEQ ID NO: 5199 - RNA, 19 nt, Artificial Sequence
  Description of Artificial Sequence: Synthetic oligonucleotide
aaccuuauuuuccaccaug

SEQ ID NO: 5200 - RNA, 19 nt, Artificial Sequence
  Description of Artificial Sequence: Synthetic oligonucleotide
gaaccuuauuuuccaccau

SEQ ID NO: 5201 - RNA, 19 nt, Artificial Sequence
  Description of Artificial Sequence: Synthetic oligonucleotide
ugaaccuuauuuuccacca

SEQ ID NO: 5202 - RNA, 19 nt, Artificial Sequence
  Description of Artificial Sequence: Synthetic oligonucleotide
cugaaccuuauuuuccacc

SEQ ID NO: 5203 - RNA, 19 nt, Artificial Sequence
  Description of Artificial Sequence: Synthetic oligonucleotide
ucugaaccuuauuuuccac

SEQ ID NO: 5204 - RNA, 19 nt, Artificial Sequence
  Description of Artificial Sequence: Synthetic oligonucleotide
aucugaaccuuauuuucca

SEQ ID NO: 5205 - RNA, 19 nt, Artificial Sequence
  Description of Artificial Sequence: Synthetic oligonucleotide
caucugaaccuuauuuucc

SEQ ID NO: 5206 - RNA, 19 nt, Artificial Sequence
  Description of Artificial Sequence: Synthetic oligonucleotide
gcaucugaaccuuauuuuc

SEQ ID NO: 5207 - RNA, 19 nt, Artificial Sequence
  Description of Artificial Sequence: Synthetic oligonucleotide
ugcaucugaaccuuauuuu

SEQ ID NO: 5208 - RNA, 19 nt, Artificial Sequence
  Description of Artificial Sequence: Synthetic oligonucleotide
cugcaucugaaccuuauuu

SEQ ID NO: 5209 - RNA, 19 nt, Artificial Sequence
  Description of Artificial Sequence: Synthetic oligonucleotide
ucugcaucugaaccuuauu

SEQ ID NO: 5210 - RNA, 19 nt, Artificial Sequence
  Description of Artificial Sequence: Synthetic oligonucleotide
uucugcaucugaaccuuau

SEQ ID NO: 5211 - RNA, 19 nt, Artificial Sequence
  Description of Artificial Sequence: Synthetic oligonucleotide
cuucugcaucugaaccuua

SEQ ID NO: 5212 - RNA, 19 nt, Artificial Sequence
  Description of Artificial Sequence: Synthetic oligonucleotide
ucuucugcaucugaaccuu

SEQ ID NO: 5213 - RNA, 19 nt, Artificial Sequence
  Description of Artificial Sequence: Synthetic oligonucleotide
uucuucugcaucugaaccu

SEQ ID NO: 5214 - RNA, 19 nt, Artificial Sequence
  Description of Artificial Sequence: Synthetic oligonucleotide
auucuucugcaucugaacc

SEQ ID NO: 5215 - RNA, 19 nt, Artificial Sequence
  Description of Artificial Sequence: Synthetic oligonucleotide
cauucuucugcaucugaac

SEQ ID NO: 5216 - RNA, 19 nt, Artificial Sequence
  Description of Artificial Sequence: Synthetic oligonucleotide
ccauucuucugcaucugaa

SEQ ID NO: 5217 - RNA, 19 nt, Artificial Sequence
  Description of Artificial Sequence: Synthetic oligonucleotide
gccauucuucugcaucuga

SEQ ID NO: 5218 - RNA, 19 nt, Artificial Sequence
  Description of Artificial Sequence: Synthetic oligonucleotide
agccauucuucugcaucug

SEQ ID NO: 5219 - RNA, 19 nt, Artificial Sequence
  Description of Artificial Sequence: Synthetic oligonucleotide
uagccauucuucugcaucu

SEQ ID NO: 5220 - RNA, 19 nt, Artificial Sequence
  Description of Artificial Sequence: Synthetic oligonucleotide
uuagccauucuucugcauc

SEQ ID NO: 5221 - RNA, 19 nt, Artificial Sequence
  Description of Artificial Sequence: Synthetic oligonucleotide
uuuagccauucuucugcau

SEQ ID NO: 5222 - RNA, 19 nt, Artificial Sequence
  Description of Artificial Sequence: Synthetic oligonucleotide
uuuuagccauucuucugca

SEQ ID NO: 5223 - RNA, 19 nt, Artificial Sequence
  Description of Artificial Sequence: Synthetic oligonucleotide
auuuuagccauucuucugc

SEQ ID NO: 5224 - RNA, 19 nt, Artificial Sequence
  Description of Artificial Sequence: Synthetic oligonucleotide
uauuuuagccauucuucug

SEQ ID NO: 5225 - RNA, 19 nt, Artificial Sequence
  Description of Artificial Sequence: Synthetic oligonucleotide
uuauuuuagccauucuucu

SEQ ID NO: 5226 - RNA, 19 nt, Artificial Sequence
  Description of Artificial Sequence: Synthetic oligonucleotide
cuuauuuuagccauucuuc

SEQ ID NO: 5227 - RNA, 19 nt, Artificial Sequence
  Description of Artificial Sequence: Synthetic oligonucleotide
ucuuauuuuagccauucuu

SEQ ID NO: 5228 - RNA, 19 nt, Artificial Sequence
  Description of Artificial Sequence: Synthetic oligonucleotide
uucuuauuuuagccauucu

SEQ ID NO: 5229 - RNA, 19 nt, Artificial Sequence
  Description of Artificial Sequence: Synthetic oligonucleotide
uuucuuauuuuagccauuc

SEQ ID NO: 5230 - RNA, 19 nt, Artificial Sequence
  Description of Artificial Sequence: Synthetic oligonucleotide
guuucuuauuuuagccauu

SEQ ID NO: 5231 - RNA, 19 nt, Artificial Sequence
  Description of Artificial Sequence: Synthetic oligonucleotide
cguuucuuauuuuagccau

SEQ ID NO: 5232 - RNA, 19 nt, Artificial Sequence
  Description of Artificial Sequence: Synthetic oligonucleotide
acguuucuuauuuuagcca

SEQ ID NO: 5233 - RNA, 19 nt, Artificial Sequence
  Description of Artificial Sequence: Synthetic oligonucleotide
cacguuucuuauuuuagcc

SEQ ID NO: 5234 - RNA, 19 nt, Artificial Sequence
  Description of Artificial Sequence: Synthetic oligonucleotide
ucacguuucuuauuuuagc

SEQ ID NO: 5235 - RNA, 19 nt, Artificial Sequence
  Description of Artificial Sequence: Synthetic oligonucleotide
aucacguuucuuauuuuag

SEQ ID NO: 5236 - RNA, 19 nt, Artificial Sequence
  Description of Artificial Sequence: Synthetic oligonucleotide
uaucacguuucuuauuuua

SEQ ID NO: 5237 - RNA, 19 nt, Artificial Sequence
  Description of Artificial Sequence: Synthetic oligonucleotide
uuaucacguuucuuauuuu

SEQ ID NO: 5238 - RNA, 19 nt, Artificial Sequence
  Description of Artificial Sequence: Synthetic oligonucleotide
cuuaucacguuucuuauuu

SEQ ID NO: 5239 - RNA, 19 nt, Artificial Sequence
  Description of Artificial Sequence: Synthetic oligonucleotide
ucuuaucacguuucuuauu

SEQ ID NO: 5240 - RNA, 19 nt, Artificial Sequence
  Description of Artificial Sequence: Synthetic oligonucleotide
uucuuaucacguuucuuau

SEQ ID NO: 5241 - RNA, 19 nt, Artificial Sequence
  Description of Artificial Sequence: Synthetic oligonucleotide
auucuuaucacguuucuua

SEQ ID NO: 5242 - RNA, 19 nt, Artificial Sequence
  Description of Artificial Sequence: Synthetic oligonucleotide
uauucuuaucacguuucuu

SEQ ID NO: 5243 - RNA, 19 nt, Artificial Sequence
  Description of Artificial Sequence: Synthetic oligonucleotide
auauucuuaucacguuucu

SEQ ID NO: 5244 - RNA, 19 nt, Artificial Sequence
  Description of Artificial Sequence: Synthetic oligonucleotide
uauauucuuaucacguuuc

SEQ ID NO: 5245 - RNA, 19 nt, Artificial Sequence
  Description of Artificial Sequence: Synthetic oligonucleotide
cuauauucuuaucacguuu

SEQ ID NO: 5246 - RNA, 19 nt, Artificial Sequence
  Description of Artificial Sequence: Synthetic oligonucleotide
ucuauauucuuaucacguu

SEQ ID NO: 5247 - RNA, 19 nt, Artificial Sequence
  Description of Artificial Sequence: Synthetic oligonucleotide
aucuauauucuuaucacgu

SEQ ID NO: 5248 - RNA, 19 nt, Artificial Sequence
  Description of Artificial Sequence: Synthetic oligonucleotide
caucuauauucuuaucacg

SEQ ID NO: 5249 - RNA, 19 nt, Artificial Sequence
  Description of Artificial Sequence: Synthetic oligonucleotide
ucaucuauauucuuaucac

SEQ ID NO: 5250 - RNA, 19 nt, Artificial Sequence
  Description of Artificial Sequence: Synthetic oligonucleotide
aucaucuauauucuuauca

SEQ ID NO: 5251 - RNA, 19 nt, Artificial Sequence
  Description of Artificial Sequence: Synthetic oligonucleotide
gaucaucuauauucuuauc

SEQ ID NO: 5252 - RNA, 19 nt, Artificial Sequence
  Description of Artificial Sequence: Synthetic oligonucleotide
ugaucaucuauauucuuau

SEQ ID NO: 5253 - RNA, 19 nt, Artificial Sequence
  Description of Artificial Sequence: Synthetic oligonucleotide
gugaucaucuauauucuua

SEQ ID NO: 5254 - RNA, 19 nt, Artificial Sequence
  Description of Artificial Sequence: Synthetic oligonucleotide
ugugaucaucuauauucuu

SEQ ID NO: 5255 - RNA, 19 nt, Artificial Sequence
  Description of Artificial Sequence: Synthetic oligonucleotide
uugugaucaucuauauucu

SEQ ID NO: 5256 - RNA, 19 nt, Artificial Sequence
  Description of Artificial Sequence: Synthetic oligonucleotide
uuugugaucaucuauauuc

SEQ ID NO: 5257 - RNA, 19 nt, Artificial Sequence
  Description of Artificial Sequence: Synthetic oligonucleotide
uuuugugaucaucuauauu

SEQ ID NO: 5258 - RNA, 19 nt, Artificial Sequence
  Description of Artificial Sequence: Synthetic oligonucleotide
uuuuugugaucaucuauau

SEQ ID NO: 5259 - RNA, 19 nt, Artificial Sequence
  Description of Artificial Sequence: Synthetic oligonucleotide
cuuuuugugaucaucuaua

SEQ ID NO: 5260 - RNA, 19 nt, Artificial Sequence
  Description of Artificial Sequence: Synthetic oligonucleotide
ccuuuuugugaucaucuau

SEQ ID NO: 5261 - RNA, 19 nt, Artificial Sequence
  Description of Artificial Sequence: Synthetic oligonucleotide
cccuuuuugugaucaucua

SEQ ID NO: 5262 - RNA, 19 nt, Artificial Sequence
  Description of Artificial Sequence: Synthetic oligonucleotide
ucccuuuuugugaucaucu

SEQ ID NO: 5263 - RNA, 19 nt, Artificial Sequence
  Description of Artificial Sequence: Synthetic oligonucleotide
cucccuuuuugugaucauc

SEQ ID NO: 5264 - RNA, 19 nt, Artificial Sequence
  Description of Artificial Sequence: Synthetic oligonucleotide
ucucccuuuuugugaucau

SEQ ID NO: 5265 - RNA, 19 nt, Artificial Sequence
  Description of Artificial Sequence: Synthetic oligonucleotide
uucucccuuuuugugauca

SEQ ID NO: 5266 - RNA, 19 nt, Artificial Sequence
  Description of Artificial Sequence: Synthetic oligonucleotide
uuucucccuuuuugugauc

SEQ ID NO: 5267 - RNA, 19 nt, Artificial Sequence
  Description of Artificial Sequence: Synthetic oligonucleotide
cuuucucccuuuuugugau

SEQ ID NO: 5268 - RNA, 19 nt, Artificial Sequence
  Description of Artificial Sequence: Synthetic oligonucleotide
ucuuucucccuuuuuguga

SEQ ID NO: 5269 - RNA, 19 nt, Artificial Sequence
  Description of Artificial Sequence: Synthetic oligonucleotide
uucuuucucccuuuuugug

SEQ ID NO: 5270 - RNA, 19 nt, Artificial Sequence
  Description of Artificial Sequence: Synthetic oligonucleotide
uuucuuucucccuuuuugu

SEQ ID NO: 5271 - RNA, 19 nt, Artificial Sequence
  Description of Artificial Sequence: Synthetic oligonucleotide
uuuucuuucucccuuuuug

SEQ ID NO: 5272 - RNA, 19 nt, Artificial Sequence
  Description of Artificial Sequence: Synthetic oligonucleotide
guuuucuuucucccuuuuu

SEQ ID NO: 5273 - RNA, 19 nt, Artificial Sequence
  Description of Artificial Sequence: Synthetic oligonucleotide
uguuuucuuucucccuuuu

SEQ ID NO: 5274 - RNA, 19 nt, Artificial Sequence
  Description of Artificial Sequence: Synthetic oligonucleotide
auguuuucuuucucccuuu

SEQ ID NO: 5275 - RNA, 19 nt, Artificial Sequence
  Description of Artificial Sequence: Synthetic oligonucleotide
cauguuuucuuucucccuu

SEQ ID NO: 5276 - RNA, 19 nt, Artificial Sequence
  Description of Artificial Sequence: Synthetic oligonucleotide
ucauguuuucuuucucccu

SEQ ID NO: 5277 - RNA, 19 nt, Artificial Sequence
  Description of Artificial Sequence: Synthetic oligonucleotide
uucauguuuucuuucuccc

SEQ ID NO: 5278 - RNA, 19 nt, Artificial Sequence
  Description of Artificial Sequence: Synthetic oligonucleotide
guucauguuuucuuucucc

SEQ ID NO: 5279 - RNA, 19 nt, Artificial Sequence
  Description of Artificial Sequence: Synthetic oligonucleotide
aguucauguuuucuuucuc

SEQ ID NO: 5280 - RNA, 19 nt, Artificial Sequence
  Description of Artificial Sequence: Synthetic oligonucleotide
caguucauguuuucuuucu

SEQ ID NO: 5281 - RNA, 19 nt, Artificial Sequence
  Description of Artificial Sequence: Synthetic oligonucleotide
ucaguucauguuuucuuuc

SEQ ID NO: 5282 - RNA, 19 nt, Artificial Sequence
  Description of Artificial Sequence: Synthetic oligonucleotide
uucaguucauguuuucuuu

SEQ ID NO: 5283 - RNA, 19 nt, Artificial Sequence
  Description of Artificial Sequence: Synthetic oligonucleotide
auucaguucauguuuucuu

SEQ ID NO: 5284 - RNA, 19 nt, Artificial Sequence
  Description of Artificial Sequence: Synthetic oligonucleotide
uauucaguucauguuuucu

SEQ ID NO: 5285 - RNA, 19 nt, Artificial Sequence
  Description of Artificial Sequence: Synthetic oligonucleotide
cuauucaguucauguuuuc

SEQ ID NO: 5286 - RNA, 19 nt, Artificial Sequence
  Description of Artificial Sequence: Synthetic oligonucleotide
ucuauucaguucauguuuu

SEQ ID NO: 5287 - RNA, 19 nt, Artificial Sequence
  Description of Artificial Sequence: Synthetic oligonucleotide
aucuauucaguucauguuu

SEQ ID NO: 5288 - RNA, 19 nt, Artificial Sequence
  Description of Artificial Sequence: Synthetic oligonucleotide
aaucuauucaguucauguu

SEQ ID NO: 5289 - RNA, 19 nt, Artificial Sequence
  Description of Artificial Sequence: Synthetic oligonucleotide
uaaucuauucaguucaugu

SEQ ID NO: 5290 - RNA, 19 nt, Artificial Sequence
  Description of Artificial Sequence: Synthetic oligonucleotide
cuaaucuauucaguucaug

SEQ ID NO: 5291 - RNA, 19 nt, Artificial Sequence
  Description of Artificial Sequence: Synthetic oligonucleotide
ucuaaucuauucaguucau

SEQ ID NO: 5292 - RNA, 19 nt, Artificial Sequence
  Description of Artificial Sequence: Synthetic oligonucleotide
uucuaaucuauucaguuca

SEQ ID NO: 5293 - RNA, 19 nt, Artificial Sequence
  Description of Artificial Sequence: Synthetic oligonucleotide
auucuaaucuauucaguuc

SEQ ID NO: 5294 - RNA, 19 nt, Artificial Sequence
  Description of Artificial Sequence: Synthetic oligonucleotide
cauucuaaucuauucaguu

SEQ ID NO: 5295 - RNA, 19 nt, Artificial Sequence
  Description of Artificial Sequence: Synthetic oligonucleotide
ccauucuaaucuauucagu

SEQ ID NO: 5296 - RNA, 19 nt, Artificial Sequence
  Description of Artificial Sequence: Synthetic oligonucleotide
cccauucuaaucuauucag

SEQ ID NO: 5297 - RNA, 19 nt, Artificial Sequence
  Description of Artificial Sequence: Synthetic oligonucleotide
acccauucuaaucuauuca

SEQ ID NO: 5298 - RNA, 19 nt, Artificial Sequence
  Description of Artificial Sequence: Synthetic oligonucleotide
cacccauucuaaucuauuc

SEQ ID NO: 5299 - RNA, 19 nt, Artificial Sequence
  Description of Artificial Sequence: Synthetic oligonucleotide
ucacccauucuaaucuauu

SEQ ID NO: 5300 - RNA, 19 nt, Artificial Sequence
  Description of Artificial Sequence: Synthetic oligonucleotide
gucacccauucuaaucuau

SEQ ID NO: 5301 - RNA, 19 nt, Artificial Sequence
  Description of Artificial Sequence: Synthetic oligonucleotide
ugucacccauucuaaucua

SEQ ID NO: 5302 - RNA, 19 nt, Artificial Sequence
  Description of Artificial Sequence: Synthetic oligonucleotide
uugucacccauucuaaucu

SEQ ID NO: 5303 - RNA, 19 nt, Artificial Sequence
  Description of Artificial Sequence: Synthetic oligonucleotide
uuugucacccauucuaauc

SEQ ID NO: 5304 - RNA, 19 nt, Artificial Sequence
  Description of Artificial Sequence: Synthetic oligonucleotide
auuugucacccauucuaau

SEQ ID NO: 5305 - RNA, 19 nt, Artificial Sequence
  Description of Artificial Sequence: Synthetic oligonucleotide
cauuugucacccauucuaa

SEQ ID NO: 5306 - RNA, 19 nt, Artificial Sequence
  Description of Artificial Sequence: Synthetic oligonucleotide
gcauuugucacccauucua

SEQ ID NO: 5307 - RNA, 19 nt, Artificial Sequence
  Description of Artificial Sequence: Synthetic oligonucleotide
ugcauuugucacccauucu

SEQ ID NO: 5308 - RNA, 19 nt, Artificial Sequence
  Description of Artificial Sequence: Synthetic oligonucleotide
cugcauuugucacccauuc

SEQ ID NO: 5309 - RNA, 19 nt, Artificial Sequence
  Description of Artificial Sequence: Synthetic oligonucleotide
acugcauuugucacccauu

SEQ ID NO: 5310 - RNA, 19 nt, Artificial Sequence
  Description of Artificial Sequence: Synthetic oligonucleotide
cacugcauuugucacccau

SEQ ID NO: 5311 - RNA, 19 nt, Artificial Sequence
  Description of Artificial Sequence: Synthetic oligonucleotide
gcacugcauuugucaccca

SEQ ID NO: 5312 - RNA, 19 nt, Artificial Sequence
  Description of Artificial Sequence: Synthetic oligonucleotide
ugcacugcauuugucaccc

SEQ ID NO: 5313 - RNA, 19 nt, Artificial Sequence
  Description of Artificial Sequence: Synthetic oligonucleotide
cugcacugcauuugucacc

SEQ ID NO: 5314 - RNA, 19 nt, Artificial Sequence
  Description of Artificial Sequence: Synthetic oligonucleotide
gcugcacugcauuugucac

SEQ ID NO: 5315 - RNA, 19 nt, Artificial Sequence
  Description of Artificial Sequence: Synthetic oligonucleotide
ggcugcacugcauuuguca

SEQ ID NO: 5316 - RNA, 19 nt, Artificial Sequence
  Description of Artificial Sequence: Synthetic oligonucleotide
uggcugcacugcauuuguc

SEQ ID NO: 5317 - RNA, 19 nt, Artificial Sequence
  Description of Artificial Sequence: Synthetic oligonucleotide
cuggcugcacugcauuugu

SEQ ID NO: 5318 - RNA, 19 nt, Artificial Sequence
  Description of Artificial Sequence: Synthetic oligonucleotide
acuggcugcacugcauuug

SEQ ID NO: 5319 - RNA, 19 nt, Artificial Sequence
  Description of Artificial Sequence: Synthetic oligonucleotide
cacuggcugcacugcauuu

SEQ ID NO: 5320 - RNA, 19 nt, Artificial Sequence
  Description of Artificial Sequence: Synthetic oligonucleotide
acacuggcugcacugcauu

SEQ ID NO: 5321 - RNA, 19 nt, Artificial Sequence
  Description of Artificial Sequence: Synthetic oligonucleotide
aacacuggcugcacugcau

SEQ ID NO: 5322 - RNA, 19 nt, Artificial Sequence
  Description of Artificial Sequence: Synthetic oligonucleotide
aaacacuggcugcacugca

SEQ ID NO: 5323 - RNA, 19 nt, Artificial Sequence
  Description of Artificial Sequence: Synthetic oligonucleotide
gaaacacuggcugcacugc

SEQ ID NO: 5324 - RNA, 19 nt, Artificial Sequence
  Description of Artificial Sequence: Synthetic oligonucleotide
ggaaacacuggcugcacug

SEQ ID NO: 5325 - RNA, 19 nt, Artificial Sequence
  Description of Artificial Sequence: Synthetic oligonucleotide
uggaaacacuggcugcacu

SEQ ID NO: 5326 - RNA, 19 nt, Artificial Sequence
  Description of Artificial Sequence: Synthetic oligonucleotide
auggaaacacuggcugcac

SEQ ID NO: 5327 - RNA, 19 nt, Artificial Sequence
  Description of Artificial Sequence: Synthetic oligonucleotide
aauggaaacacuggcugca

SEQ ID NO: 5328 - RNA, 19 nt, Artificial Sequence
  Description of Artificial Sequence: Synthetic oligonucleotide
uaauggaaacacuggcugc

SEQ ID NO: 5329 - RNA, 19 nt, Artificial Sequence
  Description of Artificial Sequence: Synthetic oligonucleotide
auaauggaaacacuggcug

SEQ ID NO: 5330 - RNA, 19 nt, Artificial Sequence
  Description of Artificial Sequence: Synthetic oligonucleotide
cauaauggaaacacuggcu

SEQ ID NO: 5331 - RNA, 19 nt, Artificial Sequence
  Description of Artificial Sequence: Synthetic oligonucleotide
gcauaauggaaacacuggc

SEQ ID NO: 5332 - RNA, 19 nt, Artificial Sequence
  Description of Artificial Sequence: Synthetic oligonucleotide
ugcauaauggaaacacugg

SEQ ID NO: 5333 - RNA, 19 nt, Artificial Sequence
  Description of Artificial Sequence: Synthetic oligonucleotide
uugcauaauggaaacacug

SEQ ID NO: 5334 - RNA, 19 nt, Artificial Sequence
  Description of Artificial Sequence: Synthetic oligonucleotide
guugcauaauggaaacacu

SEQ ID NO: 5335 - RNA, 19 nt, Artificial Sequence
  Description of Artificial Sequence: Synthetic oligonucleotide
aguugcauaauggaaacac

SEQ ID NO: 5336 - RNA, 19 nt, Artificial Sequence
  Description of Artificial Sequence: Synthetic oligonucleotide
aaguugcauaauggaaaca

SEQ ID NO: 5337 - RNA, 19 nt, Artificial Sequence
  Description of Artificial Sequence: Synthetic oligonucleotide
caaguugcauaauggaaac

SEQ ID NO: 5338 - RNA, 19 nt, Artificial Sequence
  Description of Artificial Sequence: Synthetic oligonucleotide
acaaguugcauaauggaaa

SEQ ID NO: 5339 - RNA, 19 nt, Artificial Sequence
  Description of Artificial Sequence: Synthetic oligonucleotide
gacaaguugcauaauggaa

SEQ ID NO: 5340 - RNA, 19 nt, Artificial Sequence
  Description of Artificial Sequence: Synthetic oligonucleotide
agacaaguugcauaaugga

SEQ ID NO: 5341 - RNA, 19 nt, Artificial Sequence
  Description of Artificial Sequence: Synthetic oligonucleotide
uagacaaguugcauaaugg

SEQ ID NO: 5342 - RNA, 19 nt, Artificial Sequence
  Description of Artificial Sequence: Synthetic oligonucleotide
auagacaaguugcauaaug

SEQ ID NO: 5343 - RNA, 19 nt, Artificial Sequence
  Description of Artificial Sequence: Synthetic oligonucleotide
cauagacaaguugcauaau

SEQ ID NO: 5344 - RNA, 19 nt, Artificial Sequence
  Description of Artificial Sequence: Synthetic oligonucleotide
acauagacaaguugcauaa

SEQ ID NO: 5345 - RNA, 19 nt, Artificial Sequence
  Description of Artificial Sequence: Synthetic oligonucleotide
uacauagacaaguugcaua

SEQ ID NO: 5346 - RNA, 19 nt, Artificial Sequence
  Description of Artificial Sequence: Synthetic oligonucleotide
uuacauagacaaguugcau

SEQ ID NO: 5347 - RNA, 19 nt, Artificial Sequence
  Description of Artificial Sequence: Synthetic oligonucleotide
uuuacauagacaaguugca

SEQ ID NO: 5348 - RNA, 19 nt, Artificial Sequence
  Description of Artificial Sequence: Synthetic oligonucleotide
auuuacauagacaaguugc

SEQ ID NO: 5349 - RNA, 19 nt, Artificial Sequence
  Description of Artificial Sequence: Synthetic oligonucleotide
uauuuacauagacaaguug

SEQ ID NO: 5350 - RNA, 19 nt, Artificial Sequence
  Description of Artificial Sequence: Synthetic oligonucleotide
uuauuuacauagacaaguu

SEQ ID NO: 5351 - RNA, 19 nt, Artificial Sequence
  Description of Artificial Sequence: Synthetic oligonucleotide
auuauuuacauagacaagu

SEQ ID NO: 5352 - RNA, 19 nt, Artificial Sequence
  Description of Artificial Sequence: Synthetic oligonucleotide
cauuauuuacauagacaag

SEQ ID NO: 5353 - RNA, 19 nt, Artificial Sequence
  Description of Artificial Sequence: Synthetic oligonucleotide
acauuauuuacauagacaa

SEQ ID NO: 5354 - RNA, 19 nt, Artificial Sequence
  Description of Artificial Sequence: Synthetic oligonucleotide
uacauuauuuacauagaca

SEQ ID NO: 5355 - RNA, 19 nt, Artificial Sequence
  Description of Artificial Sequence: Synthetic oligonucleotide
guacauuauuuacauagac

SEQ ID NO: 5356 - RNA, 19 nt, Artificial Sequence
  Description of Artificial Sequence: Synthetic oligonucleotide
uguacauuauuuacauaga

SEQ ID NO: 5357 - RNA, 19 nt, Artificial Sequence
  Description of Artificial Sequence: Synthetic oligonucleotide
guguacauuauuuacauag

SEQ ID NO: 5358 - RNA, 19 nt, Artificial Sequence
  Description of Artificial Sequence: Synthetic oligonucleotide
uguguacauuauuuacaua

SEQ ID NO: 5359 - RNA, 19 nt, Artificial Sequence
  Description of Artificial Sequence: Synthetic oligonucleotide
auguguacauuauuuacau

SEQ ID NO: 5360 - RNA, 19 nt, Artificial Sequence
  Description of Artificial Sequence: Synthetic oligonucleotide
aauguguacauuauuuaca

SEQ ID NO: 5361 - RNA, 19 nt, Artificial Sequence
  Description of Artificial Sequence: Synthetic oligonucleotide
aaauguguacauuauuuac

SEQ ID NO: 5362 - RNA, 19 nt, Artificial Sequence
  Description of Artificial Sequence: Synthetic oligonucleotide
caaauguguacauuauuua

SEQ ID NO: 5363 - RNA, 19 nt, Artificial Sequence
  Description of Artificial Sequence: Synthetic oligonucleotide
acaaauguguacauuauuu

SEQ ID NO: 5364 - RNA, 19 nt, Artificial Sequence
  Description of Artificial Sequence: Synthetic oligonucleotide
cacaaauguguacauuauu

SEQ ID NO: 5365 - RNA, 19 nt, Artificial Sequence
  Description of Artificial Sequence: Synthetic oligonucleotide
ccacaaauguguacauuau

SEQ ID NO: 5366 - RNA, 19 nt, Artificial Sequence
  Description of Artificial Sequence: Synthetic oligonucleotide
uccacaaauguguacauua

SEQ ID NO: 5367 - RNA, 19 nt, Artificial Sequence
  Description of Artificial Sequence: Synthetic oligonucleotide
uuccacaaauguguacauu

SEQ ID NO: 5368 - RNA, 19 nt, Artificial Sequence
  Description of Artificial Sequence: Synthetic oligonucleotide
uuuccacaaauguguacau

SEQ ID NO: 5369 - RNA, 19 nt, Artificial Sequence
  Description of Artificial Sequence: Synthetic oligonucleotide
uuuuccacaaauguguaca

SEQ ID NO: 5370 - RNA, 19 nt, Artificial Sequence
  Description of Artificial Sequence: Synthetic oligonucleotide
auuuuccacaaauguguac

SEQ ID NO: 5371 - RNA, 19 nt, Artificial Sequence
  Description of Artificial Sequence: Synthetic oligonucleotide
cauuuuccacaaaugugua

SEQ ID NO: 5372 - RNA, 19 nt, Artificial Sequence
  Description of Artificial Sequence: Synthetic oligonucleotide
gcauuuuccacaaaugugu

SEQ ID NO: 5373 - RNA, 19 nt, Artificial Sequence
  Description of Artificial Sequence: Synthetic oligonucleotide
agcauuuuccacaaaugug

SEQ ID NO: 5374 - RNA, 19 nt, Artificial Sequence
  Description of Artificial Sequence: Synthetic oligonucleotide
uagcauuuuccacaaaugu

SEQ ID NO: 5375 - RNA, 19 nt, Artificial Sequence
  Description of Artificial Sequence: Synthetic oligonucleotide
auagcauuuuccacaaaug

SEQ ID NO: 5376 - RNA, 19 nt, Artificial Sequence
  Description of Artificial Sequence: Synthetic oligonucleotide
aauagcauuuuccacaaau

SEQ ID NO: 5377 - RNA, 19 nt, Artificial Sequence
  Description of Artificial Sequence: Synthetic oligonucleotide
uaauagcauuuuccacaaa

SEQ ID NO: 5378 - RNA, 19 nt, Artificial Sequence
  Description of Artificial Sequence: Synthetic oligonucleotide
auaauagcauuuuccacaa

SEQ ID NO: 5379 - RNA, 19 nt, Artificial Sequence
  Description of Artificial Sequence: Synthetic oligonucleotide
aauaauagcauuuuccaca

SEQ ID NO: 5380 - RNA, 19 nt, Artificial Sequence
  Description of Artificial Sequence: Synthetic oligonucleotide
uaauaauagcauuuuccac

SEQ ID NO: 5381 - RNA, 19 nt, Artificial Sequence
  Description of Artificial Sequence: Synthetic oligonucleotide
uuaauaauagcauuuucca

SEQ ID NO: 5382 - RNA, 19 nt, Artificial Sequence
  Description of Artificial Sequence: Synthetic oligonucleotide
cuuaauaauagcauuuucc

SEQ ID NO: 5383 - RNA, 19 nt, Artificial Sequence
  Description of Artificial Sequence: Synthetic oligonucleotide
ucuuaauaauagcauuuuc

SEQ ID NO: 5384 - RNA, 19 nt, Artificial Sequence
  Description of Artificial Sequence: Synthetic oligonucleotide
cucuuaauaauagcauuuu

SEQ ID NO: 5385 - RNA, 19 nt, Artificial Sequence
  Description of Artificial Sequence: Synthetic oligonucleotide
ucucuuaauaauagcauuu

SEQ ID NO: 5386 - RNA, 19 nt, Artificial Sequence
  Description of Artificial Sequence: Synthetic oligonucleotide
uucucuuaauaauagcauu

SEQ ID NO: 5387 - RNA, 19 nt, Artificial Sequence
  Description of Artificial Sequence: Synthetic oligonucleotide
guucucuuaauaauagcau

SEQ ID NO: 5388 - RNA, 19 nt, Artificial Sequence
  Description of Artificial Sequence: Synthetic oligonucleotide
uguucucuuaauaauagca

SEQ ID NO: 5389 - RNA, 19 nt, Artificial Sequence
  Description of Artificial Sequence: Synthetic oligonucleotide
uuguucucuuaauaauagc

SEQ ID NO: 5390 - RNA, 19 nt, Artificial Sequence
  Description of Artificial Sequence: Synthetic oligonucleotide
cuuguucucuuaauaauag

SEQ ID NO: 5391 - RNA, 19 nt, Artificial Sequence
  Description of Artificial Sequence: Synthetic oligonucleotide
gcuuguucucuuaauaaua

SEQ ID NO: 5392 - RNA, 19 nt, Artificial Sequence
  Description of Artificial Sequence: Synthetic oligonucleotide
ugcuuguucucuuaauaau

SEQ ID NO: 5393 - RNA, 19 nt, Artificial Sequence
  Description of Artificial Sequence: Synthetic oligonucleotide
gugcuuguucucuuaauaa

SEQ ID NO: 5394 - RNA, 19 nt, Artificial Sequence
  Description of Artificial Sequence: Synthetic oligonucleotide
ugugcuuguucucuuaaua

SEQ ID NO: 5395 - RNA, 19 nt, Artificial Sequence
  Description of Artificial Sequence: Synthetic oligonucleotide
gugugcuuguucucuuaau

SEQ ID NO: 5396 - RNA, 19 nt, Artificial Sequence
  Description of Artificial Sequence: Synthetic oligonucleotide
ugugugcuuguucucuuaa

SEQ ID NO: 5397 - RNA, 19 nt, Artificial Sequence
  Description of Artificial Sequence: Synthetic oligonucleotide
cugugugcuuguucucuua

SEQ ID NO: 5398 - RNA, 19 nt, Artificial Sequence
  Description of Artificial Sequence: Synthetic oligonucleotide
acugugugcuuguucucuu

SEQ ID NO: 5399 - RNA, 19 nt, Artificial Sequence
  Description of Artificial Sequence: Synthetic oligonucleotide
cacugugugcuuguucucu

SEQ ID NO: 5400 - RNA, 19 nt, Artificial Sequence
  Description of Artificial Sequence: Synthetic oligonucleotide
ccacugugugcuuguucuc

SEQ ID NO: 5401 - RNA, 19 nt, Artificial Sequence
  Description of Artificial Sequence: Synthetic oligonucleotide
uccacugugugcuuguucu

SEQ ID NO: 5402 - RNA, 19 nt, Artificial Sequence
  Description of Artificial Sequence: Synthetic oligonucleotide
uuccacugugugcuuguuc

SEQ ID NO: 5403 - RNA, 19 nt, Artificial Sequence
  Description of Artificial Sequence: Synthetic oligonucleotide
uuuccacugugugcuuguu

SEQ ID NO: 5404 - RNA, 19 nt, Artificial Sequence
  Description of Artificial Sequence: Synthetic oligonucleotide
auuuccacugugugcuugu

SEQ ID NO: 5405 - RNA, 19 nt, Artificial Sequence
  Description of Artificial Sequence: Synthetic oligonucleotide
aauuuccacugugugcuug

SEQ ID NO: 5406 - RNA, 19 nt, Artificial Sequence
  Description of Artificial Sequence: Synthetic oligonucleotide
uaauuuccacugugugcuu

SEQ ID NO: 5407 - RNA, 19 nt, Artificial Sequence
  Description of Artificial Sequence: Synthetic oligonucleotide
guaauuuccacugugugcu

SEQ ID NO: 5408 - RNA, 19 nt, Artificial Sequence
  Description of Artificial Sequence: Synthetic oligonucleotide
aguaauuuccacugugugc

SEQ ID NO: 5409 - RNA, 19 nt, Artificial Sequence
  Description of Artificial Sequence: Synthetic oligonucleotide
caguaauuuccacugugug

SEQ ID NO: 5410 - RNA, 19 nt, Artificial Sequence
  Description of Artificial Sequence: Synthetic oligonucleotide
ucaguaauuuccacugugu

SEQ ID NO: 5411 - RNA, 19 nt, Artificial Sequence
  Description of Artificial Sequence: Synthetic oligonucleotide
aucaguaauuuccacugug

SEQ ID NO: 5412 - RNA, 19 nt, Artificial Sequence
  Description of Artificial Sequence: Synthetic oligonucleotide
caucaguaauuuccacugu

SEQ ID NO: 5413 - RNA, 19 nt, Artificial Sequence
  Description of Artificial Sequence: Synthetic oligonucleotide
ucaucaguaauuuccacug

SEQ ID NO: 5414 - RNA, 19 nt, Artificial Sequence
  Description of Artificial Sequence: Synthetic oligonucleotide
cucaucaguaauuuccacu

SEQ ID NO: 5415 - RNA, 19 nt, Artificial Sequence
  Description of Artificial Sequence: Synthetic oligonucleotide
acucaucaguaauuuccac

SEQ ID NO: 5416 - RNA, 19 nt, Artificial Sequence
  Description of Artificial Sequence: Synthetic oligonucleotide
uacucaucaguaauuucca

SEQ ID NO: 5417 - RNA, 19 nt, Artificial Sequence
  Description of Artificial Sequence: Synthetic oligonucleotide
cuacucaucaguaauuucc

SEQ ID NO: 5418 - RNA, 19 nt, Artificial Sequence
  Description of Artificial Sequence: Synthetic oligonucleotide
gcuacucaucaguaauuuc

SEQ ID NO: 5419 - RNA, 19 nt, Artificial Sequence
  Description of Artificial Sequence: Synthetic oligonucleotide
ugcuacucaucaguaauuu

SEQ ID NO: 5420 - RNA, 19 nt, Artificial Sequence
  Description of Artificial Sequence: Synthetic oligonucleotide
augcuacucaucaguaauu

SEQ ID NO: 5421 - RNA, 19 nt, Artificial Sequence
  Description of Artificial Sequence: Synthetic oligonucleotide
caugcuacucaucaguaau

SEQ ID NO: 5422 - RNA, 19 nt, Artificial Sequence
  Description of Artificial Sequence: Synthetic oligonucleotide
acaugcuacucaucaguaa

SEQ ID NO: 5423 - RNA, 19 nt, Artificial Sequence
  Description of Artificial Sequence: Synthetic oligonucleotide
cacaugcuacucaucagua

SEQ ID NO: 5424 - RNA, 19 nt, Artificial Sequence
  Description of Artificial Sequence: Synthetic oligonucleotide
ucacaugcuacucaucagu

SEQ ID NO: 5425 - RNA, 19 nt, Artificial Sequence
  Description of Artificial Sequence: Synthetic oligonucleotide
gucacaugcuacucaucag

SEQ ID NO: 5426 - RNA, 19 nt, Artificial Sequence
  Description of Artificial Sequence: Synthetic oligonucleotide
agucacaugcuacucauca

SEQ ID NO: 5427 - RNA, 19 nt, Artificial Sequence
  Description of Artificial Sequence: Synthetic oligonucleotide
aagucacaugcuacucauc

SEQ ID NO: 5428 - RNA, 19 nt, Artificial Sequence
  Description of Artificial Sequence: Synthetic oligonucleotide
aaagucacaugcuacucau

SEQ ID NO: 5429 - RNA, 19 nt, Artificial Sequence
  Description of Artificial Sequence: Synthetic oligonucleotide
gaaagucacaugcuacuca

SEQ ID NO: 5430 - RNA, 19 nt, Artificial Sequence
  Description of Artificial Sequence: Synthetic oligonucleotide
ggaaagucacaugcuacuc

SEQ ID NO: 5431 - RNA, 19 nt, Artificial Sequence
  Description of Artificial Sequence: Synthetic oligonucleotide
uggaaagucacaugcuacu

SEQ ID NO: 5432 - RNA, 19 nt, Artificial Sequence
  Description of Artificial Sequence: Synthetic oligonucleotide
uuggaaagucacaugcuac

SEQ ID NO: 5433 - RNA, 19 nt, Artificial Sequence
  Description of Artificial Sequence: Synthetic oligonucleotide
cuuggaaagucacaugcua

SEQ ID NO: 5434 - RNA, 19 nt, Artificial Sequence
  Description of Artificial Sequence: Synthetic oligonucleotide
ucuuggaaagucacaugcu

SEQ ID NO: 5435 - RNA, 19 nt, Artificial Sequence
  Description of Artificial Sequence: Synthetic oligonucleotide
cucuuggaaagucacaugc

SEQ ID NO: 5436 - RNA, 19 nt, Artificial Sequence
  Description of Artificial Sequence: Synthetic oligonucleotide
acucuuggaaagucacaug

SEQ ID NO: 5437 - RNA, 19 nt, Artificial Sequence
  Description of Artificial Sequence: Synthetic oligonucleotide
aacucuuggaaagucacau

SEQ ID NO: 5438 - RNA, 19 nt, Artificial Sequence
  Description of Artificial Sequence: Synthetic oligonucleotide
aaacucuuggaaagucaca

SEQ ID NO: 5439 - RNA, 19 nt, Artificial Sequence
  Description of Artificial Sequence: Synthetic oligonucleotide
uaaacucuuggaaagucac

SEQ ID NO: 5440 - RNA, 19 nt, Artificial Sequence
  Description of Artificial Sequence: Synthetic oligonucleotide
cuaaacucuuggaaaguca

SEQ ID NO: 5441 - RNA, 19 nt, Artificial Sequence
  Description of Artificial Sequence: Synthetic oligonucleotide
ccuaaacucuuggaaaguc

SEQ ID NO: 5442 - RNA, 19 nt, Artificial Sequence
  Description of Artificial Sequence: Synthetic oligonucleotide
accuaaacucuuggaaagu

SEQ ID NO: 5443 - RNA, 19 nt, Artificial Sequence
  Description of Artificial Sequence: Synthetic oligonucleotide
aaccuaaacucuuggaaag

SEQ ID NO: 5444 - RNA, 19 nt, Artificial Sequence
  Description of Artificial Sequence: Synthetic oligonucleotide
caaccuaaacucuuggaaa

SEQ ID NO: 5445 - RNA, 19 nt, Artificial Sequence
  Description of Artificial Sequence: Synthetic oligonucleotide
acaaccuaaacucuuggaa

SEQ ID NO: 5446 - RNA, 19 nt, Artificial Sequence
  Description of Artificial Sequence: Synthetic oligonucleotide
cacaaccuaaacucuugga

SEQ ID NO: 5447 - RNA, 19 nt, Artificial Sequence
  Description of Artificial Sequence: Synthetic oligonucleotide
gcacaaccuaaacucuugg

SEQ ID NO: 5448 - RNA, 19 nt, Artificial Sequence
  Description of Artificial Sequence: Synthetic oligonucleotide
agcacaaccuaaacucuug

SEQ ID NO: 5449 - RNA, 19 nt, Artificial Sequence
  Description of Artificial Sequence: Synthetic oligonucleotide
cagcacaaccuaaacucuu

SEQ ID NO: 5450 - RNA, 19 nt, Artificial Sequence
  Description of Artificial Sequence: Synthetic oligonucleotide
ccagcacaaccuaaacucu

SEQ ID NO: 5451 - RNA, 19 nt, Artificial Sequence
  Description of Artificial Sequence: Synthetic oligonucleotide
uccagcacaaccuaaacuc

SEQ ID NO: 5452 - RNA, 19 nt, Artificial Sequence
  Description of Artificial Sequence: Synthetic oligonucleotide
cuccagcacaaccuaaacu

SEQ ID NO: 5453 - RNA, 19 nt, Artificial Sequence
  Description of Artificial Sequence: Synthetic oligonucleotide
ccuccagcacaaccuaaac

SEQ ID NO: 5454 - RNA, 19 nt, Artificial Sequence
  Description of Artificial Sequence: Synthetic oligonucleotide
uccuccagcacaaccuaaa

SEQ ID NO: 5455 - RNA, 19 nt, Artificial Sequence
  Description of Artificial Sequence: Synthetic oligonucleotide
cuccuccagcacaaccuaa

SEQ ID NO: 5456 - RNA, 19 nt, Artificial Sequence
  Description of Artificial Sequence: Synthetic oligonucleotide
ucuccuccagcacaaccua

SEQ ID NO: 5457 - RNA, 19 nt, Artificial Sequence
  Description of Artificial Sequence: Synthetic oligonucleotide
cucuccuccagcacaaccu

SEQ ID NO: 5458 - RNA, 19 nt, Artificial Sequence
  Description of Artificial Sequence: Synthetic oligonucleotide
ccucuccuccagcacaacc

SEQ ID NO: 5459 - RNA, 19 nt, Artificial Sequence
  Description of Artificial Sequence: Synthetic oligonucleotide
accucuccuccagcacaac

SEQ ID NO: 5460 - RNA, 19 nt, Artificial Sequence
  Description of Artificial Sequence: Synthetic oligonucleotide
aaccucuccuccagcacaa

SEQ ID NO: 5461 - RNA, 19 nt, Artificial Sequence
  Description of Artificial Sequence: Synthetic oligonucleotide
aaaccucuccuccagcaca

SEQ ID NO: 5462 - RNA, 19 nt, Artificial Sequence
  Description of Artificial Sequence: Synthetic oligonucleotide
gaaaccucuccuccagcac

SEQ ID NO: 5463 - RNA, 19 nt, Artificial Sequence
  Description of Artificial Sequence: Synthetic oligonucleotide
ggaaaccucuccuccagca

SEQ ID NO: 5464 - RNA, 19 nt, Artificial Sequence
  Description of Artificial Sequence: Synthetic oligonucleotide
aggaaaccucuccuccagc

SEQ ID NO: 5465 - RNA, 19 nt, Artificial Sequence
  Description of Artificial Sequence: Synthetic oligonucleotide
aaggaaaccucuccuccag

SEQ ID NO: 5466 - RNA, 19 nt, Artificial Sequence
  Description of Artificial Sequence: Synthetic oligonucleotide
gaaggaaaccucuccucca

SEQ ID NO: 5467 - RNA, 19 nt, Artificial Sequence
  Description of Artificial Sequence: Synthetic oligonucleotide
ugaaggaaaccucuccucc

SEQ ID NO: 5468 - RNA, 19 nt, Artificial Sequence
  Description of Artificial Sequence: Synthetic oligonucleotide
cugaaggaaaccucuccuc

SEQ ID NO: 5469 - RNA, 19 nt, Artificial Sequence
  Description of Artificial Sequence: Synthetic oligonucleotide
ucugaaggaaaccucuccu

SEQ ID NO: 5470 - RNA, 19 nt, Artificial Sequence
  Description of Artificial Sequence: Synthetic oligonucleotide
aucugaaggaaaccucucc

SEQ ID NO: 5471 - RNA, 19 nt, Artificial Sequence
  Description of Artificial Sequence: Synthetic oligonucleotide
aaucugaaggaaaccucuc

SEQ ID NO: 5472 - RNA, 19 nt, Artificial Sequence
  Description of Artificial Sequence: Synthetic oligonucleotide
caaucugaaggaaaccucu

SEQ ID NO: 5473 - RNA, 19 nt, Artificial Sequence
  Description of Artificial Sequence: Synthetic oligonucleotide
gcaaucugaaggaaaccuc

SEQ ID NO: 5474 - RNA, 19 nt, Artificial Sequence
  Description of Artificial Sequence: Synthetic oligonucleotide
agcaaucugaaggaaaccu

SEQ ID NO: 5475 - RNA, 19 nt, Artificial Sequence
  Description of Artificial Sequence: Synthetic oligonucleotide
cagcaaucugaaggaaacc

SEQ ID NO: 5476 - RNA, 19 nt, Artificial Sequence
  Description of Artificial Sequence: Synthetic oligonucleotide
ucagcaaucugaaggaaac

SEQ ID NO: 5477 - RNA, 19 nt, Artificial Sequence
  Description of Artificial Sequence: Synthetic oligonucleotide
aucagcaaucugaaggaaa

SEQ ID NO: 5478 - RNA, 19 nt, Artificial Sequence
  Description of Artificial Sequence: Synthetic oligonucleotide
aaucagcaaucugaaggaa

SEQ ID NO: 5479 - RNA, 19 nt, Artificial Sequence
  Description of Artificial Sequence: Synthetic oligonucleotide
caaucagcaaucugaagga

SEQ ID NO: 5480 - RNA, 19 nt, Artificial Sequence
  Description of Artificial Sequence: Synthetic oligonucleotide
gcaaucagcaaucugaagg

SEQ ID NO: 5481 - RNA, 19 nt, Artificial Sequence
  Description of Artificial Sequence: Synthetic oligonucleotide
agcaaucagcaaucugaag

SEQ ID NO: 5482 - RNA, 19 nt, Artificial Sequence
  Description of Artificial Sequence: Synthetic oligonucleotide
aagcaaucagcaaucugaa

SEQ ID NO: 5483 - RNA, 19 nt, Artificial Sequence
  Description of Artificial Sequence: Synthetic oligonucleotide
uaagcaaucagcaaucuga

SEQ ID NO: 5484 - RNA, 19 nt, Artificial Sequence
  Description of Artificial Sequence: Synthetic oligonucleotide
auaagcaaucagcaaucug

SEQ ID NO: 5485 - RNA, 19 nt, Artificial Sequence
  Description of Artificial Sequence: Synthetic oligonucleotide
uauaagcaaucagcaaucu

SEQ ID NO: 5486 - RNA, 19 nt, Artificial Sequence
  Description of Artificial Sequence: Synthetic oligonucleotide
guauaagcaaucagcaauc

SEQ ID NO: 5487 - RNA, 19 nt, Artificial Sequence
  Description of Artificial Sequence: Synthetic oligonucleotide
uguauaagcaaucagcaau

SEQ ID NO: 5488 - RNA, 19 nt, Artificial Sequence
  Description of Artificial Sequence: Synthetic oligonucleotide
uuguauaagcaaucagcaa

SEQ ID NO: 5489 - RNA, 19 nt, Artificial Sequence
  Description of Artificial Sequence: Synthetic oligonucleotide
uuuguauaagcaaucagca

SEQ ID NO: 5490 - RNA, 19 nt, Artificial Sequence
  Description of Artificial Sequence: Synthetic oligonucleotide
auuuguauaagcaaucagc

SEQ ID NO: 5491 - RNA, 19 nt, Artificial Sequence
  Description of Artificial Sequence: Synthetic oligonucleotide
uauuuguauaagcaaucag

SEQ ID NO: 5492 - RNA, 19 nt, Artificial Sequence
  Description of Artificial Sequence: Synthetic oligonucleotide
uuauuuguauaagcaauca

SEQ ID NO: 5493 - RNA, 19 nt, Artificial Sequence
  Description of Artificial Sequence: Synthetic oligonucleotide
guuauuuguauaagcaauc

SEQ ID NO: 5494 - RNA, 19 nt, Artificial Sequence
  Description of Artificial Sequence: Synthetic oligonucleotide
gguuauuuguauaagcaau

SEQ ID NO: 5495 - RNA, 19 nt, Artificial Sequence
  Description of Artificial Sequence: Synthetic oligonucleotide
agguuauuuguauaagcaa

SEQ ID NO: 5496 - RNA, 19 nt, Artificial Sequence
  Description of Artificial Sequence: Synthetic oligonucleotide
uagguuauuuguauaagca

SEQ ID NO: 5497 - RNA, 19 nt, Artificial Sequence
  Description of Artificial Sequence: Synthetic oligonucleotide
guagguuauuuguauaagc

SEQ ID NO: 5498 - RNA, 19 nt, Artificial Sequence
  Description of Artificial Sequence: Synthetic oligonucleotide
uguagguuauuuguauaag

SEQ ID NO: 5499 - RNA, 19 nt, Artificial Sequence
  Description of Artificial Sequence: Synthetic oligonucleotide
auguagguuauuuguauaa

SEQ ID NO: 5500 - RNA, 19 nt, Artificial Sequence
  Description of Artificial Sequence: Synthetic oligonucleotide
cauguagguuauuuguaua

SEQ ID NO: 5501 - RNA, 19 nt, Artificial Sequence
  Description of Artificial Sequence: Synthetic oligonucleotide
gcauguagguuauuuguau

SEQ ID NO: 5502 - RNA, 19 nt, Artificial Sequence
  Description of Artificial Sequence: Synthetic oligonucleotide
ggcauguagguuauuugua

SEQ ID NO: 5503 - RNA, 19 nt, Artificial Sequence
  Description of Artificial Sequence: Synthetic oligonucleotide
uggcauguagguuauuugu

SEQ ID NO: 5504 - RNA, 19 nt, Artificial Sequence
  Description of Artificial Sequence: Synthetic oligonucleotide
cuggcauguagguuauuug

SEQ ID NO: 5505 - RNA, 19 nt, Artificial Sequence
  Description of Artificial Sequence: Synthetic oligonucleotide
ucuggcauguagguuauuu

SEQ ID NO: 5506 - RNA, 19 nt, Artificial Sequence
  Description of Artificial Sequence: Synthetic oligonucleotide
aucuggcauguagguuauu

SEQ ID NO: 5507 - RNA, 19 nt, Artificial Sequence
  Description of Artificial Sequence: Synthetic oligonucleotide
aaucuggcauguagguuau

SEQ ID NO: 5508 - RNA, 19 nt, Artificial Sequence
  Description of Artificial Sequence: Synthetic oligonucleotide
aaaucuggcauguagguua

SEQ ID NO: 5509 - RNA, 19 nt, Artificial Sequence
  Description of Artificial Sequence: Synthetic oligonucleotide
gaaaucuggcauguagguu

SEQ ID NO: 5510 - RNA, 19 nt, Artificial Sequence
  Description of Artificial Sequence: Synthetic oligonucleotide
agaaaucuggcauguaggu

SEQ ID NO: 5511 - RNA, 19 nt, Artificial Sequence
  Description of Artificial Sequence: Synthetic oligonucleotide
uagaaaucuggcauguagg

SEQ ID NO: 5512 - RNA, 19 nt, Artificial Sequence
  Description of Artificial Sequence: Synthetic oligonucleotide
auagaaaucuggcauguag

SEQ ID NO: 5513 - RNA, 19 nt, Artificial Sequence
  Description of Artificial Sequence: Synthetic oligonucleotide
aauagaaaucuggcaugua

SEQ ID NO: 5514 - RNA, 19 nt, Artificial Sequence
  Description of Artificial Sequence: Synthetic oligonucleotide
gaauagaaaucuggcaugu

SEQ ID NO: 5515 - RNA, 19 nt, Artificial Sequence
  Description of Artificial Sequence: Synthetic oligonucleotide
ugaauagaaaucuggcaug

SEQ ID NO: 5516 - RNA, 19 nt, Artificial Sequence
  Description of Artificial Sequence: Synthetic oligonucleotide
uugaauagaaaucuggcau

SEQ ID NO: 5517 - RNA, 19 nt, Artificial Sequence
  Description of Artificial Sequence: Synthetic oligonucleotide
guugaauagaaaucuggca

SEQ ID NO: 5518 - RNA, 19 nt, Artificial Sequence
  Description of Artificial Sequence: Synthetic oligonucleotide
cguugaauagaaaucuggc

SEQ ID NO: 5519 - RNA, 19 nt, Artificial Sequence
  Description of Artificial Sequence: Synthetic oligonucleotide
acguugaauagaaaucugg

SEQ ID NO: 5520 - RNA, 19 nt, Artificial Sequence
  Description of Artificial Sequence: Synthetic oligonucleotide
aacguugaauagaaaucug

SEQ ID NO: 5521 - RNA, 19 nt, Artificial Sequence
  Description of Artificial Sequence: Synthetic oligonucleotide
uaacguugaauagaaaucu

SEQ ID NO: 5522 - RNA, 19 nt, Artificial Sequence
  Description of Artificial Sequence: Synthetic oligonucleotide
cuaacguugaauagaaauc

SEQ ID NO: 5523 - RNA, 19 nt, Artificial Sequence
  Description of Artificial Sequence: Synthetic oligonucleotide
ucuaacguugaauagaaau

SEQ ID NO: 5524 - RNA, 19 nt, Artificial Sequence
  Description of Artificial Sequence: Synthetic oligonucleotide
cucuaacguugaauagaaa

SEQ ID NO: 5525 - RNA, 19 nt, Artificial Sequence
  Description of Artificial Sequence: Synthetic oligonucleotide
acucuaacguugaauagaa

SEQ ID NO: 5526 - RNA, 19 nt, Artificial Sequence
  Description of Artificial Sequence: Synthetic oligonucleotide
aacucuaacguugaauaga

SEQ ID NO: 5527 - RNA, 19 nt, Artificial Sequence
  Description of Artificial Sequence: Synthetic oligonucleotide
aaacucuaacguugaauag

SEQ ID NO: 5528 - RNA, 19 nt, Artificial Sequence
  Description of Artificial Sequence: Synthetic oligonucleotide
uaaacucuaacguugaaua

SEQ ID NO: 5529 - RNA, 19 nt, Artificial Sequence
  Description of Artificial Sequence: Synthetic oligonucleotide
uuaaacucuaacguugaau

SEQ ID NO: 5530 - RNA, 19 nt, Artificial Sequence
  Description of Artificial Sequence: Synthetic oligonucleotide
guuaaacucuaacguugaa

SEQ ID NO: 5531 - RNA, 19 nt, Artificial Sequence
  Description of Artificial Sequence: Synthetic oligonucleotide
uguuaaacucuaacguuga

SEQ ID NO: 5532 - RNA, 19 nt, Artificial Sequence
  Description of Artificial Sequence: Synthetic oligonucleotide
uuguuaaacucuaacguug

SEQ ID NO: 5533 - RNA, 19 nt, Artificial Sequence
  Description of Artificial Sequence: Synthetic oligonucleotide
uuuguuaaacucuaacguu

SEQ ID NO: 5534 - RNA, 19 nt, Artificial Sequence
  Description of Artificial Sequence: Synthetic oligonucleotide
uuuuguuaaacucuaacgu

SEQ ID NO: 5535 - RNA, 19 nt, Artificial Sequence
  Description of Artificial Sequence: Synthetic oligonucleotide
auuuuguuaaacucuaacg

SEQ ID NO: 5536 - RNA, 19 nt, Artificial Sequence
  Description of Artificial Sequence: Synthetic oligonucleotide
uauuuuguuaaacucuaac

SEQ ID NO: 5537 - RNA, 19 nt, Artificial Sequence
  Description of Artificial Sequence: Synthetic oligonucleotide
guauuuuguuaaacucuaa

SEQ ID NO: 5538 - RNA, 19 nt, Artificial Sequence
  Description of Artificial Sequence: Synthetic oligonucleotide
aguauuuuguuaaacucua

SEQ ID NO: 5539 - RNA, 19 nt, Artificial Sequence
  Description of Artificial Sequence: Synthetic oligonucleotide
gaguauuuuguuaaacucu

SEQ ID NO: 5540 - RNA, 19 nt, Artificial Sequence
  Description of Artificial Sequence: Synthetic oligonucleotide
ggaguauuuuguuaaacuc

SEQ ID NO: 5541 - RNA, 19 nt, Artificial Sequence
  Description of Artificial Sequence: Synthetic oligonucleotide
aggaguauuuuguuaaacu

SEQ ID NO: 5542 - RNA, 19 nt, Artificial Sequence
  Description of Artificial Sequence: Synthetic oligonucleotide
uaggaguauuuuguuaaac

SEQ ID NO: 5543 - RNA, 19 nt, Artificial Sequence
  Description of Artificial Sequence: Synthetic oligonucleotide
cuaggaguauuuuguuaaa

SEQ ID NO: 5544 - RNA, 19 nt, Artificial Sequence
  Description of Artificial Sequence: Synthetic oligonucleotide
ucuaggaguauuuuguuaa

SEQ ID NO: 5545 - RNA, 19 nt, Artificial Sequence
  Description of Artificial Sequence: Synthetic oligonucleotide
uucuaggaguauuuuguua

SEQ ID NO: 5546 - RNA, 19 nt, Artificial Sequence
  Description of Artificial Sequence: Synthetic oligonucleotide
auucuaggaguauuuuguu

SEQ ID NO: 5547 - RNA, 19 nt, Artificial Sequence
  Description of Artificial Sequence: Synthetic oligonucleotide
uauucuaggaguauuuugu

SEQ ID NO: 5548 - RNA, 19 nt, Artificial Sequence
  Description of Artificial Sequence: Synthetic oligonucleotide
uuauucuaggaguauuuug

SEQ ID NO: 5549 - RNA, 19 nt, Artificial Sequence
  Description of Artificial Sequence: Synthetic oligonucleotide
guuauucuaggaguauuuu

SEQ ID NO: 5550 - RNA, 19 nt, Artificial Sequence
  Description of Artificial Sequence: Synthetic oligonucleotide
aguuauucuaggaguauuu

SEQ ID NO: 5551 - RNA, 19 nt, Artificial Sequence
  Description of Artificial Sequence: Synthetic oligonucleotide
aaguuauucuaggaguauu

SEQ ID NO: 5552 - RNA, 19 nt, Artificial Sequence
  Description of Artificial Sequence: Synthetic oligonucleotide
caaguuauucuaggaguau

SEQ ID NO: 5553 - RNA, 19 nt, Artificial Sequence
  Description of Artificial Sequence: Synthetic oligonucleotide
acaaguuauucuaggagua

SEQ ID NO: 5554 - RNA, 19 nt, Artificial Sequence
  Description of Artificial Sequence: Synthetic oligonucleotide
aacaaguuauucuaggagu

SEQ ID NO: 5555 - RNA, 19 nt, Artificial Sequence
  Description of Artificial Sequence: Synthetic oligonucleotide
uaacaaguuauucuaggag

SEQ ID NO: 5556 - RNA, 19 nt, Artificial Sequence
  Description of Artificial Sequence: Synthetic oligonucleotide
auaacaaguuauucuagga

SEQ ID NO: 5557 - RNA, 19 nt, Artificial Sequence
  Description of Artificial Sequence: Synthetic oligonucleotide
uauaacaaguuauucuagg

SEQ ID NO: 5558 - RNA, 19 nt, Artificial Sequence
  Description of Artificial Sequence: Synthetic oligonucleotide
guauaacaaguuauucuag

SEQ ID NO: 5559 - RNA, 19 nt, Artificial Sequence
  Description of Artificial Sequence: Synthetic oligonucleotide
uguauaacaaguuauucua

SEQ ID NO: 5560 - RNA, 19 nt, Artificial Sequence
  Description of Artificial Sequence: Synthetic oligonucleotide
uuguauaacaaguuauucu

SEQ ID NO: 5561 - RNA, 19 nt, Artificial Sequence
  Description of Artificial Sequence: Synthetic oligonucleotide
auuguauaacaaguuauuc

SEQ ID NO: 5562 - RNA, 19 nt, Artificial Sequence
  Description of Artificial Sequence: Synthetic oligonucleotide
uauuguauaacaaguuauu

SEQ ID NO: 5563 - RNA, 19 nt, Artificial Sequence
  Description of Artificial Sequence: Synthetic oligonucleotide
cuauuguauaacaaguuau

SEQ ID NO: 5564 - RNA, 19 nt, Artificial Sequence
  Description of Artificial Sequence: Synthetic oligonucleotide
ccuauuguauaacaaguua

SEQ ID NO: 5565 - RNA, 19 nt, Artificial Sequence
  Description of Artificial Sequence: Synthetic oligonucleotide
accuauuguauaacaaguu

SEQ ID NO: 5566 - RNA, 19 nt, Artificial Sequence
  Description of Artificial Sequence: Synthetic oligonucleotide
aaccuauuguauaacaagu

SEQ ID NO: 5567 - RNA, 19 nt, Artificial Sequence
  Description of Artificial Sequence: Synthetic oligonucleotide
gaaccuauuguauaacaag

SEQ ID NO: 5568 - RNA, 19 nt, Artificial Sequence
  Description of Artificial Sequence: Synthetic oligonucleotide
agaaccuauuguauaacaa

SEQ ID NO: 5569 - RNA, 19 nt, Artificial Sequence
  Description of Artificial Sequence: Synthetic oligonucleotide
uagaaccuauuguauaaca

SEQ ID NO: 5570 - RNA, 19 nt, Artificial Sequence
  Description of Artificial Sequence: Synthetic oligonucleotide
uuagaaccuauuguauaac

SEQ ID NO: 5571 - RNA, 19 nt, Artificial Sequence
  Description of Artificial Sequence: Synthetic oligonucleotide
uuuagaaccuauuguauaa

SEQ ID NO: 5572 - RNA, 19 nt, Artificial Sequence
  Description of Artificial Sequence: Synthetic oligonucleotide
uuuuagaaccuauuguaua

SEQ ID NO: 5573 - RNA, 19 nt, Artificial Sequence
  Description of Artificial Sequence: Synthetic oligonucleotide
uuuuuagaaccuauuguau

SEQ ID NO: 5574 - RNA, 19 nt, Artificial Sequence
  Description of Artificial Sequence: Synthetic oligonucleotide
auuuuuagaaccuauugua

SEQ ID NO: 5575 - RNA, 19 nt, Artificial Sequence
  Description of Artificial Sequence: Synthetic oligonucleotide
uauuuuuagaaccuauugu

SEQ ID NO: 5576 - RNA, 19 nt, Artificial Sequence
  Description of Artificial Sequence: Synthetic oligonucleotide
uuauuuuuagaaccuauug

SEQ ID NO: 5577 - RNA, 19 nt, Artificial Sequence
  Description of Artificial Sequence: Synthetic oligonucleotide
uuuauuuuuagaaccuauu

SEQ ID NO: 5578 - RNA, 19 nt, Artificial Sequence
  Description of Artificial Sequence: Synthetic oligonucleotide
uuuuauuuuuagaaccuau

SEQ ID NO: 5579 - RNA, 19 nt, Artificial Sequence
  Description of Artificial Sequence: Synthetic oligonucleotide
auuuuauuuuuagaaccua

SEQ ID NO: 5580 - RNA, 19 nt, Artificial Sequence
  Description of Artificial Sequence: Synthetic oligonucleotide
aauuuuauuuuuagaaccu

SEQ ID NO: 5581 - RNA, 19 nt, Artificial Sequence
  Description of Artificial Sequence: Synthetic oligonucleotide
caauuuuauuuuuagaacc

SEQ ID NO: 5582 - RNA, 19 nt, Artificial Sequence
  Description of Artificial Sequence: Synthetic oligonucleotide
gcaauuuuauuuuuagaac

SEQ ID NO: 5583 - RNA, 19 nt, Artificial Sequence
  Description of Artificial Sequence: Synthetic oligonucleotide
agcaauuuuauuuuuagaa

SEQ ID NO: 5584 - RNA, 19 nt, Artificial Sequence
  Description of Artificial Sequence: Synthetic oligonucleotide
uagcaauuuuauuuuuaga

SEQ ID NO: 5585 - RNA, 19 nt, Artificial Sequence
  Description of Artificial Sequence: Synthetic oligonucleotide
uuagcaauuuuauuuuuag

SEQ ID NO: 5586 - RNA, 19 nt, Artificial Sequence
  Description of Artificial Sequence: Synthetic oligonucleotide
uuuagcaauuuuauuuuua

SEQ ID NO: 5587 - RNA, 19 nt, Artificial Sequence
  Description of Artificial Sequence: Synthetic oligonucleotide
guuuagcaauuuuauuuuu

SEQ ID NO: 5588 - RNA, 19 nt, Artificial Sequence
  Description of Artificial Sequence: Synthetic oligonucleotide
uguuuagcaauuuuauuuu

SEQ ID NO: 5589 - RNA, 19 nt, Artificial Sequence
  Description of Artificial Sequence: Synthetic oligonucleotide
uuguuuagcaauuuuauuu

SEQ ID NO: 5590 - RNA, 19 nt, Artificial Sequence
  Description of Artificial Sequence: Synthetic oligonucleotide
cuuguuuagcaauuuuauu

SEQ ID NO: 5591 - RNA, 19 nt, Artificial Sequence
  Description of Artificial Sequence: Synthetic oligonucleotide
ucuuguuuagcaauuuuau

SEQ ID NO: 5592 - RNA, 19 nt, Artificial Sequence
  Description of Artificial Sequence: Synthetic oligonucleotide
uucuuguuuagcaauuuua

SEQ ID NO: 5593 - RNA, 19 nt, Artificial Sequence
  Description of Artificial Sequence: Synthetic oligonucleotide
uuucuuguuuagcaauuuu

SEQ ID NO: 5594 - RNA, 19 nt, Artificial Sequence
  Description of Artificial Sequence: Synthetic oligonucleotide
auuucuuguuuagcaauuu

SEQ ID NO: 5595 - RNA, 19 nt, Artificial Sequence
  Description of Artificial Sequence: Synthetic oligonucleotide
cauuucuuguuuagcaauu

SEQ ID NO: 5596 - RNA, 19 nt, Artificial Sequence
  Description of Artificial Sequence: Synthetic oligonucleotide
ucauuucuuguuuagcaau

SEQ ID NO: 5597 - RNA, 19 nt, Artificial Sequence
  Description of Artificial Sequence: Synthetic oligonucleotide
uucauuucuuguuuagcaa

SEQ ID NO: 5598 - RNA, 19 nt, Artificial Sequence
  Description of Artificial Sequence: Synthetic oligonucleotide
uuucauuucuuguuuagca

SEQ ID NO: 5599 - RNA, 19 nt, Artificial Sequence
  Description of Artificial Sequence: Synthetic oligonucleotide
uuuucauuucuuguuuagc

SEQ ID NO: 5600 - RNA, 19 nt, Artificial Sequence
  Description of Artificial Sequence: Synthetic oligonucleotide
guuuucauuucuuguuuag

SEQ ID NO: 5601 - RNA, 19 nt, Artificial Sequence
  Description of Artificial Sequence: Synthetic oligonucleotide
uguuuucauuucuuguuua

SEQ ID NO: 5602 - RNA, 19 nt, Artificial Sequence
  Description of Artificial Sequence: Synthetic oligonucleotide
auguuuucauuucuuguuu

SEQ ID NO: 5603 - RNA, 19 nt, Artificial Sequence
  Description of Artificial Sequence: Synthetic oligonucleotide
cauguuuucauuucuuguu

SEQ ID NO: 5604 - RNA, 19 nt, Artificial Sequence
  Description of Artificial Sequence: Synthetic oligonucleotide
ccauguuuucauuucuugu

SEQ ID NO: 5605 - RNA, 19 nt, Artificial Sequence
  Description of Artificial Sequence: Synthetic oligonucleotide
uccauguuuucauuucuug

SEQ ID NO: 5606 - RNA, 19 nt, Artificial Sequence
  Description of Artificial Sequence: Synthetic oligonucleotide
cuccauguuuucauuucuu

SEQ ID NO: 5607 - RNA, 19 nt, Artificial Sequence
  Description of Artificial Sequence: Synthetic oligonucleotide
gcuccauguuuucauuucu

SEQ ID NO: 5608 - RNA, 19 nt, Artificial Sequence
  Description of Artificial Sequence: Synthetic oligonucleotide
ugcuccauguuuucauuuc

SEQ ID NO: 5609 - RNA, 19 nt, Artificial Sequence
  Description of Artificial Sequence: Synthetic oligonucleotide
augcuccauguuuucauuu

SEQ ID NO: 5610 - RNA, 19 nt, Artificial Sequence
  Description of Artificial Sequence: Synthetic oligonucleotide
aaugcuccauguuuucauu

SEQ ID NO: 5611 - RNA, 19 nt, Artificial Sequence
  Description of Artificial Sequence: Synthetic oligonucleotide
caaugcuccauguuuucau

SEQ ID NO: 5612 - RNA, 19 nt, Artificial Sequence
  Description of Artificial Sequence: Synthetic oligonucleotide
acaaugcuccauguuuuca

SEQ ID NO: 5613 - RNA, 19 nt, Artificial Sequence
  Description of Artificial Sequence: Synthetic oligonucleotide
aacaaugcuccauguuuuc

SEQ ID NO: 5614 - RNA, 19 nt, Artificial Sequence
  Description of Artificial Sequence: Synthetic oligonucleotide
uaacaaugcuccauguuuu

SEQ ID NO: 5615 - RNA, 19 nt, Artificial Sequence
  Description of Artificial Sequence: Synthetic oligonucleotide
uuaacaaugcuccauguuu

SEQ ID NO: 5616 - RNA, 19 nt, Artificial Sequence
  Description of Artificial Sequence: Synthetic oligonucleotide
auuaacaaugcuccauguu

SEQ ID NO: 5617 - RNA, 19 nt, Artificial Sequence
  Description of Artificial Sequence: Synthetic oligonucleotide
aauuaacaaugcuccaugu

SEQ ID NO: 5618 - RNA, 19 nt, Artificial Sequence
  Description of Artificial Sequence: Synthetic oligonucleotide
aaauuaacaaugcuccaug

SEQ ID NO: 5619 - RNA, 19 nt, Artificial Sequence
  Description of Artificial Sequence: Synthetic oligonucleotide
uaaauuaacaaugcuccau

SEQ ID NO: 5620 - RNA, 19 nt, Artificial Sequence
  Description of Artificial Sequence: Synthetic oligonucleotide
guaaauuaacaaugcucca

SEQ ID NO: 5621 - RNA, 19 nt, Artificial Sequence
  Description of Artificial Sequence: Synthetic oligonucleotide
uguaaauuaacaaugcucc

SEQ ID NO: 5622 - RNA, 19 nt, Artificial Sequence
  Description of Artificial Sequence: Synthetic oligonucleotide
uuguaaauuaacaaugcuc

SEQ ID NO: 5623 - RNA, 19 nt, Artificial Sequence
  Description of Artificial Sequence: Synthetic oligonucleotide
guuguaaauuaacaaugcu

SEQ ID NO: 5624 - RNA, 19 nt, Artificial Sequence
  Description of Artificial Sequence: Synthetic oligonucleotide
uguuguaaauuaacaaugc

SEQ ID NO: 5625 - RNA, 19 nt, Artificial Sequence
  Description of Artificial Sequence: Synthetic oligonucleotide
cuguuguaaauuaacaaug

SEQ ID NO: 5626 - RNA, 19 nt, Artificial Sequence
  Description of Artificial Sequence: Synthetic oligonucleotide
ucuguuguaaauuaacaau

SEQ ID NO: 5627 - RNA, 19 nt, Artificial Sequence
  Description of Artificial Sequence: Synthetic oligonucleotide
uucuguuguaaauuaacaa

SEQ ID NO: 5628 - RNA, 19 nt, Artificial Sequence
  Description of Artificial Sequence: Synthetic oligonucleotide
uuucuguuguaaauuaaca

SEQ ID NO: 5629 - RNA, 19 nt, Artificial Sequence
  Description of Artificial Sequence: Synthetic oligonucleotide
uuuucuguuguaaauuaac

SEQ ID NO: 5630 - RNA, 19 nt, Artificial Sequence
  Description of Artificial Sequence: Synthetic oligonucleotide
auuuucuguuguaaauuaa

SEQ ID NO: 5631 - RNA, 19 nt, Artificial Sequence
  Description of Artificial Sequence: Synthetic oligonucleotide
aauuuucuguuguaaauua

SEQ ID NO: 5632 - RNA, 19 nt, Artificial Sequence
  Description of Artificial Sequence: Synthetic oligonucleotide
uaauuuucuguuguaaauu

SEQ ID NO: 5633 - RNA, 19 nt, Artificial Sequence
  Description of Artificial Sequence: Synthetic oligonucleotide
guaauuuucuguuguaaau

SEQ ID NO: 5634 - RNA, 19 nt, Artificial Sequence
  Description of Artificial Sequence: Synthetic oligonucleotide
gguaauuuucuguuguaaa

SEQ ID NO: 5635 - RNA, 19 nt, Artificial Sequence
  Description of Artificial Sequence: Synthetic oligonucleotide
agguaauuuucuguuguaa

SEQ ID NO: 5636 - RNA, 19 nt, Artificial Sequence
  Description of Artificial Sequence: Synthetic oligonucleotide
aagguaauuuucuguugua

SEQ ID NO: 5637 - RNA, 19 nt, Artificial Sequence
  Description of Artificial Sequence: Synthetic oligonucleotide
aaagguaauuuucuguugu

SEQ ID NO: 5638 - RNA, 19 nt, Artificial Sequence
  Description of Artificial Sequence: Synthetic oligonucleotide
aaaagguaauuuucuguug

SEQ ID NO: 5639 - RNA, 19 nt, Artificial Sequence
  Description of Artificial Sequence: Synthetic oligonucleotide
caaaagguaauuuucuguu

SEQ ID NO: 5640 - RNA, 19 nt, Artificial Sequence
  Description of Artificial Sequence: Synthetic oligonucleotide
ucaaaagguaauuuucugu

SEQ ID NO: 5641 - RNA, 19 nt, Artificial Sequence
  Description of Artificial Sequence: Synthetic oligonucleotide
aucaaaagguaauuuucug

SEQ ID NO: 5642 - RNA, 19 nt, Artificial Sequence
  Description of Artificial Sequence: Synthetic oligonucleotide
aaucaaaagguaauuuucu

SEQ ID NO: 5643 - RNA, 19 nt, Artificial Sequence
  Description of Artificial Sequence: Synthetic oligonucleotide
aaaucaaaagguaauuuuc

SEQ ID NO: 5644 - RNA, 19 nt, Artificial Sequence
  Description of Artificial Sequence: Synthetic oligonucleotide
caaaucaaaagguaauuuu

SEQ ID NO: 5645 - RNA, 19 nt, Artificial Sequence
  Description of Artificial Sequence: Synthetic oligonucleotide
acaaaucaaaagguaauuu

SEQ ID NO: 5646 - RNA, 19 nt, Artificial Sequence
  Description of Artificial Sequence: Synthetic oligonucleotide
uacaaaucaaaagguaauu

SEQ ID NO: 5647 - RNA, 19 nt, Artificial Sequence
  Description of Artificial Sequence: Synthetic oligonucleotide
uuacaaaucaaaagguaau

SEQ ID NO: 5648 - RNA, 19 nt, Artificial Sequence
  Description of Artificial Sequence: Synthetic oligonucleotide
guuacaaaucaaaagguaa

SEQ ID NO: 5649 - RNA, 19 nt, Artificial Sequence
  Description of Artificial Sequence: Synthetic oligonucleotide
uguuacaaaucaaaaggua

SEQ ID NO: 5650 - RNA, 19 nt, Artificial Sequence
  Description of Artificial Sequence: Synthetic oligonucleotide
guguuacaaaucaaaaggu

SEQ ID NO: 5651 - RNA, 19 nt, Artificial Sequence
  Description of Artificial Sequence: Synthetic oligonucleotide
aguguuacaaaucaaaagg

SEQ ID NO: 5652 - RNA, 19 nt, Artificial Sequence
  Description of Artificial Sequence: Synthetic oligonucleotide
uaguguuacaaaucaaaag

SEQ ID NO: 5653 - RNA, 19 nt, Artificial Sequence
  Description of Artificial Sequence: Synthetic oligonucleotide
guaguguuacaaaucaaaa

SEQ ID NO: 5654 - RNA, 19 nt, Artificial Sequence
  Description of Artificial Sequence: Synthetic oligonucleotide
aguaguguuacaaaucaaa

SEQ ID NO: 5655 - RNA, 19 nt, Artificial Sequence
  Description of Artificial Sequence: Synthetic oligonucleotide
aaguaguguuacaaaucaa

SEQ ID NO: 5656 - RNA, 19 nt, Artificial Sequence
  Description of Artificial Sequence: Synthetic oligonucleotide
gaaguaguguuacaaauca

SEQ ID NO: 5657 - RNA, 19 nt, Artificial Sequence
  Description of Artificial Sequence: Synthetic oligonucleotide
agaaguaguguuacaaauc

SEQ ID NO: 5658 - RNA, 19 nt, Artificial Sequence
  Description of Artificial Sequence: Synthetic oligonucleotide
cagaaguaguguuacaaau

SEQ ID NO: 5659 - RNA, 19 nt, Artificial Sequence
  Description of Artificial Sequence: Synthetic oligonucleotide
gcagaaguaguguuacaaa

SEQ ID NO: 5660 - RNA, 19 nt, Artificial Sequence
  Description of Artificial Sequence: Synthetic oligonucleotide
agcagaaguaguguuacaa

SEQ ID NO: 5661 - RNA, 19 nt, Artificial Sequence
  Description of Artificial Sequence: Synthetic oligonucleotide
cagcagaaguaguguuaca

SEQ ID NO: 5662 - RNA, 19 nt, Artificial Sequence
  Description of Artificial Sequence: Synthetic oligonucleotide
acagcagaaguaguguuac

SEQ ID NO: 5663 - RNA, 19 nt, Artificial Sequence
  Description of Artificial Sequence: Synthetic oligonucleotide
aacagcagaaguaguguua

SEQ ID NO: 5664 - RNA, 19 nt, Artificial Sequence
  Description of Artificial Sequence: Synthetic oligonucleotide
gaacagcagaaguaguguu

SEQ ID NO: 5665 - RNA, 19 nt, Artificial Sequence
  Description of Artificial Sequence: Synthetic oligonucleotide
ugaacagcagaaguagugu

SEQ ID NO: 5666 - RNA, 19 nt, Artificial Sequence
  Description of Artificial Sequence: Synthetic oligonucleotide
uugaacagcagaaguagug

SEQ ID NO: 5667 - RNA, 19 nt, Artificial Sequence
  Description of Artificial Sequence: Synthetic oligonucleotide
auugaacagcagaaguagu

SEQ ID NO: 5668 - RNA, 19 nt, Artificial Sequence
  Description of Artificial Sequence: Synthetic oligonucleotide
gauugaacagcagaaguag

SEQ ID NO: 5669 - RNA, 19 nt, Artificial Sequence
  Description of Artificial Sequence: Synthetic oligonucleotide
ugauugaacagcagaagua

SEQ ID NO: 5670 - RNA, 19 nt, Artificial Sequence
  Description of Artificial Sequence: Synthetic oligonucleotide
uugauugaacagcagaagu

SEQ ID NO: 5671 - RNA, 19 nt, Artificial Sequence
  Description of Artificial Sequence: Synthetic oligonucleotide
cuugauugaacagcagaag

SEQ ID NO: 5672 - RNA, 19 nt, Artificial Sequence
  Description of Artificial Sequence: Synthetic oligonucleotide
ucuugauugaacagcagaa

SEQ ID NO: 5673 - RNA, 19 nt, Artificial Sequence
  Description of Artificial Sequence: Synthetic oligonucleotide
cucuugauugaacagcaga

SEQ ID NO: 5674 - RNA, 19 nt, Artificial Sequence
  Description of Artificial Sequence: Synthetic oligonucleotide
acucuugauugaacagcag

SEQ ID NO: 5675 - RNA, 19 nt, Artificial Sequence
  Description of Artificial Sequence: Synthetic oligonucleotide
gacucuugauugaacagca

SEQ ID NO: 5676 - RNA, 19 nt, Artificial Sequence
  Description of Artificial Sequence: Synthetic oligonucleotide
agacucuugauugaacagc

SEQ ID NO: 5677 - RNA, 19 nt, Artificial Sequence
  Description of Artificial Sequence: Synthetic oligonucleotide
aagacucuugauugaacag

SEQ ID NO: 5678 - RNA, 19 nt, Artificial Sequence
  Description of Artificial Sequence: Synthetic oligonucleotide
caagacucuugauugaaca

SEQ ID NO: 5679 - RNA, 19 nt, Artificial Sequence
  Description of Artificial Sequence: Synthetic oligonucleotide
ccaagacucuugauugaac

SEQ ID NO: 5680 - RNA, 19 nt, Artificial Sequence
  Description of Artificial Sequence: Synthetic oligonucleotide
accaagacucuugauugaa

SEQ ID NO: 5681 - RNA, 19 nt, Artificial Sequence
  Description of Artificial Sequence: Synthetic oligonucleotide
uaccaagacucuugauuga

SEQ ID NO: 5682 - RNA, 19 nt, Artificial Sequence
  Description of Artificial Sequence: Synthetic oligonucleotide
cuaccaagacucuugauug

SEQ ID NO: 5683 - RNA, 19 nt, Artificial Sequence
  Description of Artificial Sequence: Synthetic oligonucleotide
ucuaccaagacucuugauu

SEQ ID NO: 5684 - RNA, 19 nt, Artificial Sequence
  Description of Artificial Sequence: Synthetic oligonucleotide
aucuaccaagacucuugau

SEQ ID NO: 5685 - RNA, 19 nt, Artificial Sequence
  Description of Artificial Sequence: Synthetic oligonucleotide
uaucuaccaagacucuuga

SEQ ID NO: 5686 - RNA, 19 nt, Artificial Sequence
  Description of Artificial Sequence: Synthetic oligonucleotide
uuaucuaccaagacucuug

SEQ ID NO: 5687 - RNA, 19 nt, Artificial Sequence
  Description of Artificial Sequence: Synthetic oligonucleotide
cuuaucuaccaagacucuu

SEQ ID NO: 5688 - RNA, 19 nt, Artificial Sequence
  Description of Artificial Sequence: Synthetic oligonucleotide
ucuuaucuaccaagacucu

SEQ ID NO: 5689 - RNA, 19 nt, Artificial Sequence
  Description of Artificial Sequence: Synthetic oligonucleotide
uucuuaucuaccaagacuc

SEQ ID NO: 5690 - RNA, 19 nt, Artificial Sequence
  Description of Artificial Sequence: Synthetic oligonucleotide
uuucuuaucuaccaagacu

SEQ ID NO: 5691 - RNA, 19 nt, Artificial Sequence
  Description of Artificial Sequence: Synthetic oligonucleotide
uuuucuuaucuaccaagac

SEQ ID NO: 5692 - RNA, 19 nt, Artificial Sequence
  Description of Artificial Sequence: Synthetic oligonucleotide
uuuuucuuaucuaccaaga

SEQ ID NO: 5693 - RNA, 19 nt, Artificial Sequence
  Description of Artificial Sequence: Synthetic oligonucleotide
uuuuuucuuaucuaccaag

SEQ ID NO: 5694 - RNA, 19 nt, Artificial Sequence
  Description of Artificial Sequence: Synthetic oligonucleotide
uuuuuuucuuaucuaccaa

SEQ ID NO: 5695 - RNA, 19 nt, Artificial Sequence
  Description of Artificial Sequence: Synthetic oligonucleotide
auuuuuuucuuaucuacca

SEQ ID NO: 5696 - RNA, 19 nt, Artificial Sequence
  Description of Artificial Sequence: Synthetic oligonucleotide
gauuuuuuucuuaucuacc

SEQ ID NO: 5697 - RNA, 19 nt, Artificial Sequence
  Description of Artificial Sequence: Synthetic oligonucleotide
ugauuuuuuucuuaucuac

SEQ ID NO: 5698 - RNA, 19 nt, Artificial Sequence
  Description of Artificial Sequence: Synthetic oligonucleotide
cugauuuuuuucuuaucua

SEQ ID NO: 5699 - RNA, 19 nt, Artificial Sequence
  Description of Artificial Sequence: Synthetic oligonucleotide
acugauuuuuuucuuaucu

SEQ ID NO: 5700 - RNA, 19 nt, Artificial Sequence
  Description of Artificial Sequence: Synthetic oligonucleotide
gacugauuuuuuucuuauc

SEQ ID NO: 5701 - RNA, 19 nt, Artificial Sequence
  Description of Artificial Sequence: Synthetic oligonucleotide
ugacugauuuuuuucuuau

SEQ ID NO: 5702 - RNA, 19 nt, Artificial Sequence
  Description of Artificial Sequence: Synthetic oligonucleotide
uugacugauuuuuuucuua

SEQ ID NO: 5703 - RNA, 19 nt, Artificial Sequence
  Description of Artificial Sequence: Synthetic oligonucleotide
auugacugauuuuuuucuu

SEQ ID NO: 5704 - RNA, 19 nt, Artificial Sequence
  Description of Artificial Sequence: Synthetic oligonucleotide
uauugacugauuuuuuucu

SEQ ID NO: 5705 - RNA, 19 nt, Artificial Sequence
  Description of Artificial Sequence: Synthetic oligonucleotide
auauugacugauuuuuuuc

SEQ ID NO: 5706 - RNA, 19 nt, Artificial Sequence
  Description of Artificial Sequence: Synthetic oligonucleotide
aauauugacugauuuuuuu

SEQ ID NO: 5707 - RNA, 19 nt, Artificial Sequence
  Description of Artificial Sequence: Synthetic oligonucleotide
aaauauugacugauuuuuu

SEQ ID NO: 5708 - RNA, 19 nt, Artificial Sequence
  Description of Artificial Sequence: Synthetic oligonucleotide
gaaauauugacugauuuuu

SEQ ID NO: 5709 - RNA, 19 nt, Artificial Sequence
  Description of Artificial Sequence: Synthetic oligonucleotide
ggaaauauugacugauuuu

SEQ ID NO: 5710 - RNA, 19 nt, Artificial Sequence
  Description of Artificial Sequence: Synthetic oligonucleotide
uggaaauauugacugauuu

SEQ ID NO: 5711 - RNA, 19 nt, Artificial Sequence
  Description of Artificial Sequence: Synthetic oligonucleotide
uuggaaauauugacugauu

SEQ ID NO: 5712 - RNA, 19 nt, Artificial Sequence
  Description of Artificial Sequence: Synthetic oligonucleotide
uuuggaaauauugacugau

SEQ ID NO: 5713 - RNA, 19 nt, Artificial Sequence
  Description of Artificial Sequence: Synthetic oligonucleotide
auuuggaaauauugacuga

SEQ ID NO: 5714 - RNA, 19 nt, Artificial Sequence
  Description of Artificial Sequence: Synthetic oligonucleotide
uauuuggaaauauugacug

SEQ ID NO: 5715 - RNA, 19 nt, Artificial Sequence
  Description of Artificial Sequence: Synthetic oligonucleotide
uuauuuggaaauauugacu

SEQ ID NO: 5716 - RNA, 19 nt, Artificial Sequence
  Description of Artificial Sequence: Synthetic oligonucleotide
auuauuuggaaauauugac

SEQ ID NO: 5717 - RNA, 19 nt, Artificial Sequence
  Description of Artificial Sequence: Synthetic oligonucleotide
aauuauuuggaaauauuga

SEQ ID NO: 5718 - RNA, 19 nt, Artificial Sequence
  Description of Artificial Sequence: Synthetic oligonucleotide
caauuauuuggaaauauug

SEQ ID NO: 5719 - RNA, 19 nt, Artificial Sequence
  Description of Artificial Sequence: Synthetic oligonucleotide
gcaauuauuuggaaauauu

SEQ ID NO: 5720 - RNA, 19 nt, Artificial Sequence
  Description of Artificial Sequence: Synthetic oligonucleotide
ugcaauuauuuggaaauau

SEQ ID NO: 5721 - RNA, 19 nt, Artificial Sequence
  Description of Artificial Sequence: Synthetic oligonucleotide
uugcaauuauuuggaaaua

SEQ ID NO: 5722 - RNA, 19 nt, Artificial Sequence
  Description of Artificial Sequence: Synthetic oligonucleotide
uuugcaauuauuuggaaau

SEQ ID NO: 5723 - RNA, 19 nt, Artificial Sequence
  Description of Artificial Sequence: Synthetic oligonucleotide
uuuugcaauuauuuggaaa

SEQ ID NO: 5724 - RNA, 19 nt, Artificial Sequence
  Description of Artificial Sequence: Synthetic oligonucleotide
auuuugcaauuauuuggaa

SEQ ID NO: 5725 - RNA, 19 nt, Artificial Sequence
  Description of Artificial Sequence: Synthetic oligonucleotide
uauuuugcaauuauuugga

SEQ ID NO: 5726 - RNA, 19 nt, Artificial Sequence
  Description of Artificial Sequence: Synthetic oligonucleotide
uuauuuugcaauuauuugg

SEQ ID NO: 5727 - RNA, 19 nt, Artificial Sequence
  Description of Artificial Sequence: Synthetic oligonucleotide
auuauuuugcaauuauuug

SEQ ID NO: 5728 - RNA, 19 nt, Artificial Sequence
  Description of Artificial Sequence: Synthetic oligonucleotide
cauuauuuugcaauuauuu

SEQ ID NO: 5729 - RNA, 19 nt, Artificial Sequence
  Description of Artificial Sequence: Synthetic oligonucleotide
ccauuauuuugcaauuauu

SEQ ID NO: 5730 - RNA, 19 nt, Artificial Sequence
  Description of Artificial Sequence: Synthetic oligonucleotide
gccauuauuuugcaauuau

SEQ ID NO: 5731 - RNA, 19 nt, Artificial Sequence
  Description of Artificial Sequence: Synthetic oligonucleotide
ggccauuauuuugcaauua

SEQ ID NO: 5732 - RNA, 19 nt, Artificial Sequence
  Description of Artificial Sequence: Synthetic oligonucleotide
uggccauuauuuugcaauu

SEQ ID NO: 5733 - RNA, 19 nt, Artificial Sequence
  Description of Artificial Sequence: Synthetic oligonucleotide
cuggccauuauuuugcaau

SEQ ID NO: 5734 - RNA, 19 nt, Artificial Sequence
  Description of Artificial Sequence: Synthetic oligonucleotide
acuggccauuauuuugcaa

SEQ ID NO: 5735 - RNA, 19 nt, Artificial Sequence
  Description of Artificial Sequence: Synthetic oligonucleotide
aacuggccauuauuuugca

SEQ ID NO: 5736 - RNA, 19 nt, Artificial Sequence
  Description of Artificial Sequence: Synthetic oligonucleotide
caacuggccauuauuuugc

SEQ ID NO: 5737 - RNA, 19 nt, Artificial Sequence
  Description of Artificial Sequence: Synthetic oligonucleotide
acaacuggccauuauuuug

SEQ ID NO: 5738 - RNA, 19 nt, Artificial Sequence
  Description of Artificial Sequence: Synthetic oligonucleotide
aacaacuggccauuauuuu

SEQ ID NO: 5739 - RNA, 19 nt, Artificial Sequence
  Description of Artificial Sequence: Synthetic oligonucleotide
aaacaacuggccauuauuu

SEQ ID NO: 5740 - RNA, 19 nt, Artificial Sequence
  Description of Artificial Sequence: Synthetic oligonucleotide
uaaacaacuggccauuauu

SEQ ID NO: 5741 - RNA, 19 nt, Artificial Sequence
  Description of Artificial Sequence: Synthetic oligonucleotide
cuaaacaacuggccauuau

SEQ ID NO: 5742 - RNA, 19 nt, Artificial Sequence
  Description of Artificial Sequence: Synthetic oligonucleotide
ccuaaacaacuggccauua

SEQ ID NO: 5743 - RNA, 19 nt, Artificial Sequence
  Description of Artificial Sequence: Synthetic oligonucleotide
uccuaaacaacuggccauu

SEQ ID NO: 5744 - RNA, 19 nt, Artificial Sequence
  Description of Artificial Sequence: Synthetic oligonucleotide
uuccuaaacaacuggccau

SEQ ID NO: 5745 - RNA, 19 nt, Artificial Sequence
  Description of Artificial Sequence: Synthetic oligonucleotide
cuuccuaaacaacuggcca

SEQ ID NO: 5746 - RNA, 19 nt, Artificial Sequence
  Description of Artificial Sequence: Synthetic oligonucleotide
ccuuccuaaacaacuggcc

SEQ ID NO: 5747 - RNA, 19 nt, Artificial Sequence
  Description of Artificial Sequence: Synthetic oligonucleotide
gccuuccuaaacaacuggc

SEQ ID NO: 5748 - RNA, 19 nt, Artificial Sequence
  Description of Artificial Sequence: Synthetic oligonucleotide
ggccuuccuaaacaacugg

SEQ ID NO: 5749 - RNA, 19 nt, Artificial Sequence
  Description of Artificial Sequence: Synthetic oligonucleotide
aggccuuccuaaacaacug

SEQ ID NO: 5750 - RNA, 19 nt, Artificial Sequence
  Description of Artificial Sequence: Synthetic oligonucleotide
aaggccuuccuaaacaacu

SEQ ID NO: 5751 - RNA, 19 nt, Artificial Sequence
  Description of Artificial Sequence: Synthetic oligonucleotide
aaaggccuuccuaaacaac

SEQ ID NO: 5752 - RNA, 19 nt, Artificial Sequence
  Description of Artificial Sequence: Synthetic oligonucleotide
uaaaggccuuccuaaacaa

SEQ ID NO: 5753 - RNA, 19 nt, Artificial Sequence
  Description of Artificial Sequence: Synthetic oligonucleotide
cuaaaggccuuccuaaaca

SEQ ID NO: 5754 - RNA, 19 nt, Artificial Sequence
  Description of Artificial Sequence: Synthetic oligonucleotide
ccuaaaggccuuccuaaac

SEQ ID NO: 5755 - RNA, 19 nt, Artificial Sequence
  Description of Artificial Sequence: Synthetic oligonucleotide
uccuaaaggccuuccuaaa

SEQ ID NO: 5756 - RNA, 19 nt, Artificial Sequence
  Description of Artificial Sequence: Synthetic oligonucleotide
uuccuaaaggccuuccuaa

SEQ ID NO: 5757 - RNA, 19 nt, Artificial Sequence
  Description of Artificial Sequence: Synthetic oligonucleotide
cuuccuaaaggccuuccua

SEQ ID NO: 5758 - RNA, 19 nt, Artificial Sequence
  Description of Artificial Sequence: Synthetic oligonucleotide
ucuuccuaaaggccuuccu

SEQ ID NO: 5759 - RNA, 19 nt, Artificial Sequence
  Description of Artificial Sequence: Synthetic oligonucleotide
gucuuccuaaaggccuucc

SEQ ID NO: 5760 - RNA, 19 nt, Artificial Sequence
  Description of Artificial Sequence: Synthetic oligonucleotide
ugucuuccuaaaggccuuc

SEQ ID NO: 5761 - RNA, 19 nt, Artificial Sequence
  Description of Artificial Sequence: Synthetic oligonucleotide
uugucuuccuaaaggccuu

SEQ ID NO: 5762 - RNA, 19 nt, Artificial Sequence
  Description of Artificial Sequence: Synthetic oligonucleotide
uuugucuuccuaaaggccu

SEQ ID NO: 5763 - RNA, 19 nt, Artificial Sequence
  Description of Artificial Sequence: Synthetic oligonucleotide
auuugucuuccuaaaggcc

SEQ ID NO: 5764 - RNA, 19 nt, Artificial Sequence
  Description of Artificial Sequence: Synthetic oligonucleotide
uauuugucuuccuaaaggc

SEQ ID NO: 5765 - RNA, 19 nt, Artificial Sequence
  Description of Artificial Sequence: Synthetic oligonucleotide
uuauuugucuuccuaaagg

SEQ ID NO: 5766 - RNA, 19 nt, Artificial Sequence
  Description of Artificial Sequence: Synthetic oligonucleotide
uuuauuugucuuccuaaag

SEQ ID NO: 5767 - RNA, 19 nt, Artificial Sequence
  Description of Artificial Sequence: Synthetic oligonucleotide
auuuauuugucuuccuaaa

SEQ ID NO: 5768 - RNA, 19 nt, Artificial Sequence
  Description of Artificial Sequence: Synthetic oligonucleotide
uauuuauuugucuuccuaa

SEQ ID NO: 5769 - RNA, 19 nt, Artificial Sequence
  Description of Artificial Sequence: Synthetic oligonucleotide
uuauuuauuugucuuccua

SEQ ID NO: 5770 - RNA, 19 nt, Artificial Sequence
  Description of Artificial Sequence: Synthetic oligonucleotide
guuauuuauuugucuuccu

SEQ ID NO: 5771 - RNA, 19 nt, Artificial Sequence
  Description of Artificial Sequence: Synthetic oligonucleotide
uguuauuuauuugucuucc

SEQ ID NO: 5772 - RNA, 19 nt, Artificial Sequence
  Description of Artificial Sequence: Synthetic oligonucleotide
uuguuauuuauuugucuuc

SEQ ID NO: 5773 - RNA, 19 nt, Artificial Sequence
  Description of Artificial Sequence: Synthetic oligonucleotide
uuuguuauuuauuugucuu

SEQ ID NO: 5774 - RNA, 19 nt, Artificial Sequence
  Description of Artificial Sequence: Synthetic oligonucleotide
guuuguuauuuauuugucu

SEQ ID NO: 5775 - RNA, 19 nt, Artificial Sequence
  Description of Artificial Sequence: Synthetic oligonucleotide
uguuuguuauuuauuuguc

SEQ ID NO: 5776 - RNA, 19 nt, Artificial Sequence
  Description of Artificial Sequence: Synthetic oligonucleotide
uuguuuguuauuuauuugu

SEQ ID NO: 5777 - RNA, 19 nt, Artificial Sequence
  Description of Artificial Sequence: Synthetic oligonucleotide
uuuguuuguuauuuauuug

SEQ ID NO: 5778 - RNA, 19 nt, Artificial Sequence
  Description of Artificial Sequence: Synthetic oligonucleotide
guuuguuuguuauuuauuu

SEQ ID NO: 5779 - RNA, 19 nt, Artificial Sequence
  Description of Artificial Sequence: Synthetic oligonucleotide
uguuuguuuguuauuuauu

SEQ ID NO: 5780 - RNA, 19 nt, Artificial Sequence
  Description of Artificial Sequence: Synthetic oligonucleotide
cuguuuguuuguuauuuau

SEQ ID NO: 5781 - RNA, 19 nt, Artificial Sequence
  Description of Artificial Sequence: Synthetic oligonucleotide
gcuguuuguuuguuauuua

SEQ ID NO: 5782 - RNA, 19 nt, Artificial Sequence
  Description of Artificial Sequence: Synthetic oligonucleotide
ggcuguuuguuuguuauuu

SEQ ID NO: 5783 - RNA, 19 nt, Artificial Sequence
  Description of Artificial Sequence: Synthetic oligonucleotide
uggcuguuuguuuguuauu

SEQ ID NO: 5784 - RNA, 19 nt, Artificial Sequence
  Description of Artificial Sequence: Synthetic oligonucleotide
guggcuguuuguuuguuau

SEQ ID NO: 5785 - RNA, 19 nt, Artificial Sequence
  Description of Artificial Sequence: Synthetic oligonucleotide
uguggcuguuuguuuguua

SEQ ID NO: 5786 - RNA, 19 nt, Artificial Sequence
  Description of Artificial Sequence: Synthetic oligonucleotide
uuguggcuguuuguuuguu

SEQ ID NO: 5787 - RNA, 19 nt, Artificial Sequence
  Description of Artificial Sequence: Synthetic oligonucleotide
uuuguggcuguuuguuugu

SEQ ID NO: 5788 - RNA, 19 nt, Artificial Sequence
  Description of Artificial Sequence: Synthetic oligonucleotide
auuuguggcuguuuguuug

SEQ ID NO: 5789 - RNA, 19 nt, Artificial Sequence
  Description of Artificial Sequence: Synthetic oligonucleotide
uauuuguggcuguuuguuu

SEQ ID NO: 5790 - RNA, 19 nt, Artificial Sequence
  Description of Artificial Sequence: Synthetic oligonucleotide
guauuuguggcuguuuguu

SEQ ID NO: 5791 - RNA, 19 nt, Artificial Sequence
  Description of Artificial Sequence: Synthetic oligonucleotide
aguauuuguggcuguuugu

SEQ ID NO: 5792 - RNA, 19 nt, Artificial Sequence
  Description of Artificial Sequence: Synthetic oligonucleotide
aaguauuuguggcuguuug

SEQ ID NO: 5793 - RNA, 19 nt, Artificial Sequence
  Description of Artificial Sequence: Synthetic oligonucleotide
aaaguauuuguggcuguuu

SEQ ID NO: 5794 - RNA, 19 nt, Artificial Sequence
  Description of Artificial Sequence: Synthetic oligonucleotide
aaaaguauuuguggcuguu

SEQ ID NO: 5795 - RNA, 19 nt, Artificial Sequence
  Description of Artificial Sequence: Synthetic oligonucleotide
aaaaaguauuuguggcugu

SEQ ID NO: 5796 - RNA, 19 nt, Artificial Sequence
  Description of Artificial Sequence: Synthetic oligonucleotide
aaaaaaguauuuguggcug

SEQ ID NO: 5797 - RNA, 19 nt, Artificial Sequence
  Description of Artificial Sequence: Synthetic oligonucleotide
aaaaaaaguauuuguggcu

SEQ ID NO: 5798 - RNA, 19 nt, Artificial Sequence
  Description of Artificial Sequence: Synthetic oligonucleotide
aaaaaaaaguauuuguggc

SEQ ID NO: 5799 - RNA, 19 nt, Artificial Sequence
  Description of Artificial Sequence: Synthetic oligonucleotide
gaaaaaaaaguauuugugg

SEQ ID NO: 5800 - RNA, 19 nt, Artificial Sequence
  Description of Artificial Sequence: Synthetic oligonucleotide
ugaaaaaaaaguauuugug

SEQ ID NO: 5801 - RNA, 19 nt, Artificial Sequence
  Description of Artificial Sequence: Synthetic oligonucleotide
uugaaaaaaaaguauuugu

SEQ ID NO: 5802 - RNA, 19 nt, Artificial Sequence
  Description of Artificial Sequence: Synthetic oligonucleotide
uuugaaaaaaaaguauuug

SEQ ID NO: 5803 - RNA, 19 nt, Artificial Sequence
  Description of Artificial Sequence: Synthetic oligonucleotide
uuuugaaaaaaaaguauuu

SEQ ID NO: 5804 - RNA, 19 nt, Artificial Sequence
  Description of Artificial Sequence: Synthetic oligonucleotide
auuuugaaaaaaaaguauu

SEQ ID NO: 5805 - RNA, 19 nt, Artificial Sequence
  Description of Artificial Sequence: Synthetic oligonucleotide
aauuuugaaaaaaaaguau

SEQ ID NO: 5806 - RNA, 19 nt, Artificial Sequence
  Description of Artificial Sequence: Synthetic oligonucleotide
aaauuuugaaaaaaaagua

SEQ ID NO: 5807 - RNA, 19 nt, Artificial Sequence
  Description of Artificial Sequence: Synthetic oligonucleotide
aaaauuuugaaaaaaaagu

SEQ ID NO: 5808 - RNA, 19 nt, Artificial Sequence
  Description of Artificial Sequence: Synthetic oligonucleotide
uaaaauuuugaaaaaaaag

SEQ ID NO: 5809 - RNA, 19 nt, Artificial Sequence
  Description of Artificial Sequence: Synthetic oligonucleotide
cuaaaauuuugaaaaaaaa

SEQ ID NO: 5810 - RNA, 19 nt, Artificial Sequence
  Description of Artificial Sequence: Synthetic oligonucleotide
acuaaaauuuugaaaaaaa

SEQ ID NO: 5811 - RNA, 19 nt, Artificial Sequence
  Description of Artificial Sequence: Synthetic oligonucleotide
aacuaaaauuuugaaaaaa

SEQ ID NO: 5812 - RNA, 19 nt, Artificial Sequence
  Description of Artificial Sequence: Synthetic oligonucleotide
aaacuaaaauuuugaaaaa

SEQ ID NO: 5813 - RNA, 19 nt, Artificial Sequence
  Description of Artificial Sequence: Synthetic oligonucleotide
aaaacuaaaauuuugaaaa

SEQ ID NO: 5814 - RNA, 19 nt, Artificial Sequence
  Description of Artificial Sequence: Synthetic oligonucleotide
uaaaacuaaaauuuugaaa

SEQ ID NO: 5815 - RNA, 19 nt, Artificial Sequence
  Description of Artificial Sequence: Synthetic oligonucleotide
guaaaacuaaaauuuugaa

SEQ ID NO: 5816 - RNA, 19 nt, Artificial Sequence
  Description of Artificial Sequence: Synthetic oligonucleotide
gguaaaacuaaaauuuuga

SEQ ID NO: 5817 - RNA, 19 nt, Artificial Sequence
  Description of Artificial Sequence: Synthetic oligonucleotide
agguaaaacuaaaauuuug

SEQ ID NO: 5818 - RNA, 19 nt, Artificial Sequence
  Description of Artificial Sequence: Synthetic oligonucleotide
cagguaaaacuaaaauuuu

SEQ ID NO: 5819 - RNA, 19 nt, Artificial Sequence
  Description of Artificial Sequence: Synthetic oligonucleotide
acagguaaaacuaaaauuu

SEQ ID NO: 5820 - RNA, 19 nt, Artificial Sequence
  Description of Artificial Sequence: Synthetic oligonucleotide
uacagguaaaacuaaaauu

SEQ ID NO: 5821 - RNA, 19 nt, Artificial Sequence
  Description of Artificial Sequence: Synthetic oligonucleotide
uuacagguaaaacuaaaau

SEQ ID NO: 5822 - RNA, 19 nt, Artificial Sequence
  Description of Artificial Sequence: Synthetic oligonucleotide
auuacagguaaaacuaaaa

SEQ ID NO: 5823 - RNA, 19 nt, Artificial Sequence
  Description of Artificial Sequence: Synthetic oligonucleotide
aauuacagguaaaacuaaa

SEQ ID NO: 5824 - RNA, 19 nt, Artificial Sequence
  Description of Artificial Sequence: Synthetic oligonucleotide
uaauuacagguaaaacuaa

SEQ ID NO: 5825 - RNA, 19 nt, Artificial Sequence
  Description of Artificial Sequence: Synthetic oligonucleotide
uuaauuacagguaaaacua

SEQ ID NO: 5826 - RNA, 19 nt, Artificial Sequence
  Description of Artificial Sequence: Synthetic oligonucleotide
auuaauuacagguaaaacu

SEQ ID NO: 5827 - RNA, 19 nt, Artificial Sequence
  Description of Artificial Sequence: Synthetic oligonucleotide
uauuaauuacagguaaaac

SEQ ID NO: 5828 - RNA, 19 nt, Artificial Sequence
  Description of Artificial Sequence: Synthetic oligonucleotide
uuauuaauuacagguaaaa

SEQ ID NO: 5829 - RNA, 19 nt, Artificial Sequence
  Description of Artificial Sequence: Synthetic oligonucleotide
cuuauuaauuacagguaaa

SEQ ID NO: 5830 - RNA, 19 nt, Artificial Sequence
  Description of Artificial Sequence: Synthetic oligonucleotide
ucuuauuaauuacagguaa

SEQ ID NO: 5831 - RNA, 19 nt, Artificial Sequence
  Description of Artificial Sequence: Synthetic oligonucleotide
uucuuauuaauuacaggua

SEQ ID NO: 5832 - RNA, 19 nt, Artificial Sequence
  Description of Artificial Sequence: Synthetic oligonucleotide
guucuuauuaauuacaggu

SEQ ID NO: 5833 - RNA, 19 nt, Artificial Sequence
  Description of Artificial Sequence: Synthetic oligonucleotide
aguucuuauuaauuacagg

SEQ ID NO: 5834 - RNA, 19 nt, Artificial Sequence
  Description of Artificial Sequence: Synthetic oligonucleotide
caguucuuauuaauuacag

SEQ ID NO: 5835 - RNA, 19 nt, Artificial Sequence
  Description of Artificial Sequence: Synthetic oligonucleotide
ucaguucuuauuaauuaca

SEQ ID NO: 5836 - RNA, 19 nt, Artificial Sequence
  Description of Artificial Sequence: Synthetic oligonucleotide
aucaguucuuauuaauuac

SEQ ID NO: 5837 - RNA, 19 nt, Artificial Sequence
  Description of Artificial Sequence: Synthetic oligonucleotide
uaucaguucuuauuaauua

SEQ ID NO: 5838 - RNA, 19 nt, Artificial Sequence
  Description of Artificial Sequence: Synthetic oligonucleotide
guaucaguucuuauuaauu

SEQ ID NO: 5839 - RNA, 19 nt, Artificial Sequence
  Description of Artificial Sequence: Synthetic oligonucleotide
uguaucaguucuuauuaau

SEQ ID NO: 5840 - RNA, 19 nt, Artificial Sequence
  Description of Artificial Sequence: Synthetic oligonucleotide
uuguaucaguucuuauuaa

SEQ ID NO: 5841 - RNA, 19 nt, Artificial Sequence
  Description of Artificial Sequence: Synthetic oligonucleotide
cuuguaucaguucuuauua

SEQ ID NO: 5842 - RNA, 19 nt, Artificial Sequence
  Description of Artificial Sequence: Synthetic oligonucleotide
ucuuguaucaguucuuauu

SEQ ID NO: 5843 - RNA, 19 nt, Artificial Sequence
  Description of Artificial Sequence: Synthetic oligonucleotide
gucuuguaucaguucuuau

SEQ ID NO: 5844 - RNA, 19 nt, Artificial Sequence
  Description of Artificial Sequence: Synthetic oligonucleotide
ugucuuguaucaguucuua

SEQ ID NO: 5845 - RNA, 19 nt, Artificial Sequence
  Description of Artificial Sequence: Synthetic oligonucleotide
uugucuuguaucaguucuu

SEQ ID NO: 5846 - RNA, 19 nt, Artificial Sequence
  Description of Artificial Sequence: Synthetic oligonucleotide
uuugucuuguaucaguucu

SEQ ID NO: 5847 - RNA, 19 nt, Artificial Sequence
  Description of Artificial Sequence: Synthetic oligonucleotide
uuuugucuuguaucaguuc

SEQ ID NO: 5848 - RNA, 19 nt, Artificial Sequence
  Description of Artificial Sequence: Synthetic oligonucleotide
uuuuugucuuguaucaguu

SEQ ID NO: 5849 - RNA, 19 nt, Artificial Sequence
  Description of Artificial Sequence: Synthetic oligonucleotide
guuuuugucuuguaucagu

SEQ ID NO: 5850 - RNA, 19 nt, Artificial Sequence
  Description of Artificial Sequence: Synthetic oligonucleotide
uguuuuugucuuguaucag

SEQ ID NO: 5851 - RNA, 19 nt, Artificial Sequence
  Description of Artificial Sequence: Synthetic oligonucleotide
cuguuuuugucuuguauca

SEQ ID NO: 5852 - RNA, 19 nt, Artificial Sequence
  Description of Artificial Sequence: Synthetic oligonucleotide
acuguuuuugucuuguauc

SEQ ID NO: 5853 - RNA, 19 nt, Artificial Sequence
  Description of Artificial Sequence: Synthetic oligonucleotide
aacuguuuuugucuuguau

SEQ ID NO: 5854 - RNA, 19 nt, Artificial Sequence
  Description of Artificial Sequence: Synthetic oligonucleotide
gaacuguuuuugucuugua

SEQ ID NO: 5855 - RNA, 19 nt, Artificial Sequence
  Description of Artificial Sequence: Synthetic oligonucleotide
ggaacuguuuuugucuugu

SEQ ID NO: 5856 - RNA, 19 nt, Artificial Sequence
  Description of Artificial Sequence: Synthetic oligonucleotide
aggaacuguuuuugucuug

SEQ ID NO: 5857 - RNA, 19 nt, Artificial Sequence
  Description of Artificial Sequence: Synthetic oligonucleotide
aaggaacuguuuuugucuu

SEQ ID NO: 5858 - RNA, 19 nt, Artificial Sequence
  Description of Artificial Sequence: Synthetic oligonucleotide
gaaggaacuguuuuugucu

SEQ ID NO: 5859 - RNA, 19 nt, Artificial Sequence
  Description of Artificial Sequence: Synthetic oligonucleotide
ugaaggaacuguuuuuguc

SEQ ID NO: 5860 - RNA, 19 nt, Artificial Sequence
  Description of Artificial Sequence: Synthetic oligonucleotide
cugaaggaacuguuuuugu

SEQ ID NO: 5861 - RNA, 19 nt, Artificial Sequence
  Description of Artificial Sequence: Synthetic oligonucleotide
ucugaaggaacuguuuuug

SEQ ID NO: 5862 - RNA, 19 nt, Artificial Sequence
  Description of Artificial Sequence: Synthetic oligonucleotide
aucugaaggaacuguuuuu

SEQ ID NO: 5863 - RNA, 19 nt, Artificial Sequence
  Description of Artificial Sequence: Synthetic oligonucleotide
aaucugaaggaacuguuuu

SEQ ID NO: 5864 - RNA, 19 nt, Artificial Sequence
  Description of Artificial Sequence: Synthetic oligonucleotide
gaaucugaaggaacuguuu

SEQ ID NO: 5865 - RNA, 19 nt, Artificial Sequence
  Description of Artificial Sequence: Synthetic oligonucleotide
agaaucugaaggaacuguu

SEQ ID NO: 5866 - RNA, 19 nt, Artificial Sequence
  Description of Artificial Sequence: Synthetic oligonucleotide
uagaaucugaaggaacugu

SEQ ID NO: 5867 - RNA, 19 nt, Artificial Sequence
  Description of Artificial Sequence: Synthetic oligonucleotide
guagaaucugaaggaacug

SEQ ID NO: 5868 - RNA, 19 nt, Artificial Sequence
  Description of Artificial Sequence: Synthetic oligonucleotide
cguagaaucugaaggaacu

SEQ ID NO: 5869 - RNA, 19 nt, Artificial Sequence
  Description of Artificial Sequence: Synthetic oligonucleotide
ccguagaaucugaaggaac

SEQ ID NO: 5870 - RNA, 19 nt, Artificial Sequence
  Description of Artificial Sequence: Synthetic oligonucleotide
uccguagaaucugaaggaa

SEQ ID NO: 5871 - RNA, 19 nt, Artificial Sequence
  Description of Artificial Sequence: Synthetic oligonucleotide
uuccguagaaucugaagga

SEQ ID NO: 5872 - RNA, 19 nt, Artificial Sequence
  Description of Artificial Sequence: Synthetic oligonucleotide
auuccguagaaucugaagg

SEQ ID NO: 5873 - RNA, 19 nt, Artificial Sequence
  Description of Artificial Sequence: Synthetic oligonucleotide
cauuccguagaaucugaag

SEQ ID NO: 5874 - RNA, 19 nt, Artificial Sequence
  Description of Artificial Sequence: Synthetic oligonucleotide
ucauuccguagaaucugaa

SEQ ID NO: 5875 - RNA, 19 nt, Artificial Sequence
  Description of Artificial Sequence: Synthetic oligonucleotide
gucauuccguagaaucuga

SEQ ID NO: 5876 - RNA, 19 nt, Artificial Sequence
  Description of Artificial Sequence: Synthetic oligonucleotide
ugucauuccguagaaucug

SEQ ID NO: 5877 - RNA, 19 nt, Artificial Sequence
  Description of Artificial Sequence: Synthetic oligonucleotide
cugucauuccguagaaucu

SEQ ID NO: 5878 - RNA, 19 nt, Artificial Sequence
  Description of Artificial Sequence: Synthetic oligonucleotide
acugucauuccguagaauc

SEQ ID NO: 5879 - RNA, 19 nt, Artificial Sequence
  Description of Artificial Sequence: Synthetic oligonucleotide
uacugucauuccguagaau

SEQ ID NO: 5880 - RNA, 19 nt, Artificial Sequence
  Description of Artificial Sequence: Synthetic oligonucleotide
auacugucauuccguagaa

SEQ ID NO: 5881 - RNA, 19 nt, Artificial Sequence
  Description of Artificial Sequence: Synthetic oligonucleotide
uauacugucauuccguaga

SEQ ID NO: 5882 - RNA, 19 nt, Artificial Sequence
  Description of Artificial Sequence: Synthetic oligonucleotide
auauacugucauuccguag

SEQ ID NO: 5883 - RNA, 19 nt, Artificial Sequence
  Description of Artificial Sequence: Synthetic oligonucleotide
gauauacugucauuccgua

SEQ ID NO: 5884 - RNA, 19 nt, Artificial Sequence
  Description of Artificial Sequence: Synthetic oligonucleotide
agauauacugucauuccgu

SEQ ID NO: 5885 - RNA, 19 nt, Artificial Sequence
  Description of Artificial Sequence: Synthetic oligonucleotide
gagauauacugucauuccg

SEQ ID NO: 5886 - RNA, 19 nt, Artificial Sequence
  Description of Artificial Sequence: Synthetic oligonucleotide
agagauauacugucauucc

SEQ ID NO: 5887 - RNA, 19 nt, Artificial Sequence
  Description of Artificial Sequence: Synthetic oligonucleotide
gagagauauacugucauuc

SEQ ID NO: 5888 - RNA, 19 nt, Artificial Sequence
  Description of Artificial Sequence: Synthetic oligonucleotide
agagagauauacugucauu

SEQ ID NO: 5889 - RNA, 19 nt, Artificial Sequence
  Description of Artificial Sequence: Synthetic oligonucleotide
aagagagauauacugucau

SEQ ID NO: 5890 - RNA, 19 nt, Artificial Sequence
  Description of Artificial Sequence: Synthetic oligonucleotide
aaagagagauauacuguca

SEQ ID NO: 5891 - RNA, 19 nt, Artificial Sequence
  Description of Artificial Sequence: Synthetic oligonucleotide
uaaagagagauauacuguc

SEQ ID NO: 5892 - RNA, 19 nt, Artificial Sequence
  Description of Artificial Sequence: Synthetic oligonucleotide
auaaagagagauauacugu

SEQ ID NO: 5893 - RNA, 19 nt, Artificial Sequence
  Description of Artificial Sequence: Synthetic oligonucleotide
gauaaagagagauauacug

SEQ ID NO: 5894 - RNA, 19 nt, Artificial Sequence
  Description of Artificial Sequence: Synthetic oligonucleotide
ggauaaagagagauauacu

SEQ ID NO: 5895 - RNA, 19 nt, Artificial Sequence
  Description of Artificial Sequence: Synthetic oligonucleotide
aggauaaagagagauauac

SEQ ID NO: 5896 - RNA, 19 nt, Artificial Sequence
  Description of Artificial Sequence: Synthetic oligonucleotide
uaggauaaagagagauaua

SEQ ID NO: 5897 - RNA, 19 nt, Artificial Sequence
  Description of Artificial Sequence: Synthetic oligonucleotide
auaggauaaagagagauau

SEQ ID NO: 5898 - RNA, 19 nt, Artificial Sequence
  Description of Artificial Sequence: Synthetic oligonucleotide
cauaggauaaagagagaua

SEQ ID NO: 5899 - RNA, 19 nt, Artificial Sequence
  Description of Artificial Sequence: Synthetic oligonucleotide
acauaggauaaagagagau

SEQ ID NO: 5900 - RNA, 19 nt, Artificial Sequence
  Description of Artificial Sequence: Synthetic oligonucleotide
cacauaggauaaagagaga

SEQ ID NO: 5901 - RNA, 19 nt, Artificial Sequence
  Description of Artificial Sequence: Synthetic oligonucleotide
ucacauaggauaaagagag

SEQ ID NO: 5902 - RNA, 19 nt, Artificial Sequence
  Description of Artificial Sequence: Synthetic oligonucleotide
aucacauaggauaaagaga

SEQ ID NO: 5903 - RNA, 19 nt, Artificial Sequence
  Description of Artificial Sequence: Synthetic oligonucleotide
aaucacauaggauaaagag

SEQ ID NO: 5904 - RNA, 19 nt, Artificial Sequence
  Description of Artificial Sequence: Synthetic oligonucleotide
gaaucacauaggauaaaga

SEQ ID NO: 5905 - RNA, 19 nt, Artificial Sequence
  Description of Artificial Sequence: Synthetic oligonucleotide
ggaaucacauaggauaaag

SEQ ID NO: 5906 - RNA, 19 nt, Artificial Sequence
  Description of Artificial Sequence: Synthetic oligonucleotide
aggaaucacauaggauaaa

SEQ ID NO: 5907 - RNA, 19 nt, Artificial Sequence
  Description of Artificial Sequence: Synthetic oligonucleotide
caggaaucacauaggauaa

SEQ ID NO: 5908 - RNA, 19 nt, Artificial Sequence
  Description of Artificial Sequence: Synthetic oligonucleotide
gcaggaaucacauaggaua

SEQ ID NO: 5909 - RNA, 19 nt, Artificial Sequence
  Description of Artificial Sequence: Synthetic oligonucleotide
agcaggaaucacauaggau

SEQ ID NO: 5910 - RNA, 19 nt, Artificial Sequence
  Description of Artificial Sequence: Synthetic oligonucleotide
gagcaggaaucacauagga

SEQ ID NO: 5911 - RNA, 19 nt, Artificial Sequence
  Description of Artificial Sequence: Synthetic oligonucleotide
agagcaggaaucacauagg

SEQ ID NO: 5912 - RNA, 19 nt, Artificial Sequence
  Description of Artificial Sequence: Synthetic oligonucleotide
cagagcaggaaucacauag

SEQ ID NO: 5913 - RNA, 19 nt, Artificial Sequence
  Description of Artificial Sequence: Synthetic oligonucleotide
ucagagcaggaaucacaua

SEQ ID NO: 5914 - RNA, 19 nt, Artificial Sequence
  Description of Artificial Sequence: Synthetic oligonucleotide
uucagagcaggaaucacau

SEQ ID NO: 5915 - RNA, 19 nt, Artificial Sequence
  Description of Artificial Sequence: Synthetic oligonucleotide
auucagagcaggaaucaca

SEQ ID NO: 5916 - RNA, 19 nt, Artificial Sequence
  Description of Artificial Sequence: Synthetic oligonucleotide
cauucagagcaggaaucac

SEQ ID NO: 5917 - RNA, 19 nt, Artificial Sequence
  Description of Artificial Sequence: Synthetic oligonucleotide
gcauucagagcaggaauca

SEQ ID NO: 5918 - RNA, 19 nt, Artificial Sequence
  Description of Artificial Sequence: Synthetic oligonucleotide
ugcauucagagcaggaauc

SEQ ID NO: 5919 - RNA, 19 nt, Artificial Sequence
  Description of Artificial Sequence: Synthetic oligonucleotide
augcauucagagcaggaau

SEQ ID NO: 5920 - RNA, 19 nt, Artificial Sequence
  Description of Artificial Sequence: Synthetic oligonucleotide
aaugcauucagagcaggaa

SEQ ID NO: 5921 - RNA, 19 nt, Artificial Sequence
  Description of Artificial Sequence: Synthetic oligonucleotide
uaaugcauucagagcagga

SEQ ID NO: 5922 - RNA, 19 nt, Artificial Sequence
  Description of Artificial Sequence: Synthetic oligonucleotide
auaaugcauucagagcagg

SEQ ID NO: 5923 - RNA, 19 nt, Artificial Sequence
  Description of Artificial Sequence: Synthetic oligonucleotide
uauaaugcauucagagcag

SEQ ID NO: 5924 - RNA, 19 nt, Artificial Sequence
  Description of Artificial Sequence: Synthetic oligonucleotide
auauaaugcauucagagca

SEQ ID NO: 5925 - RNA, 19 nt, Artificial Sequence
  Description of Artificial Sequence: Synthetic oligonucleotide
aauauaaugcauucagagc

SEQ ID NO: 5926 - RNA, 19 nt, Artificial Sequence
  Description of Artificial Sequence: Synthetic oligonucleotide
aaauauaaugcauucagag

SEQ ID NO: 5927 - RNA, 19 nt, Artificial Sequence
  Description of Artificial Sequence: Synthetic oligonucleotide
aaaauauaaugcauucaga

SEQ ID NO: 5928 - RNA, 19 nt, Artificial Sequence
  Description of Artificial Sequence: Synthetic oligonucleotide
gaaaauauaaugcauucag

SEQ ID NO: 5929 - RNA, 19 nt, Artificial Sequence
  Description of Artificial Sequence: Synthetic oligonucleotide
ggaaaauauaaugcauuca

SEQ ID NO: 5930 - RNA, 19 nt, Artificial Sequence
  Description of Artificial Sequence: Synthetic oligonucleotide
uggaaaauauaaugcauuc

SEQ ID NO: 5931 - RNA, 19 nt, Artificial Sequence
  Description of Artificial Sequence: Synthetic oligonucleotide
uuggaaaauauaaugcauu

SEQ ID NO: 5932 - RNA, 19 nt, Artificial Sequence
  Description of Artificial Sequence: Synthetic oligonucleotide
uuuggaaaauauaaugcau

SEQ ID NO: 5933 - RNA, 19 nt, Artificial Sequence
  Description of Artificial Sequence: Synthetic oligonucleotide
guuuggaaaauauaaugca

SEQ ID NO: 5934 - RNA, 19 nt, Artificial Sequence
  Description of Artificial Sequence: Synthetic oligonucleotide
aguuuggaaaauauaaugc

SEQ ID NO: 5935 - RNA, 19 nt, Artificial Sequence
  Description of Artificial Sequence: Synthetic oligonucleotide
uaguuuggaaaauauaaug

SEQ ID NO: 5936 - RNA, 19 nt, Artificial Sequence
  Description of Artificial Sequence: Synthetic oligonucleotide
auaguuuggaaaauauaau

SEQ ID NO: 5937 - RNA, 19 nt, Artificial Sequence
  Description of Artificial Sequence: Synthetic oligonucleotide
uauaguuuggaaaauauaa

SEQ ID NO: 5938 - RNA, 19 nt, Artificial Sequence
  Description of Artificial Sequence: Synthetic oligonucleotide
guauaguuuggaaaauaua

SEQ ID NO: 5939 - RNA, 19 nt, Artificial Sequence
  Description of Artificial Sequence: Synthetic oligonucleotide
gguauaguuuggaaaauau

SEQ ID NO: 5940 - RNA, 19 nt, Artificial Sequence
  Description of Artificial Sequence: Synthetic oligonucleotide
ggguauaguuuggaaaaua

SEQ ID NO: 5941 - RNA, 19 nt, Artificial Sequence
  Description of Artificial Sequence: Synthetic oligonucleotide
uggguauaguuuggaaaau

SEQ ID NO: 5942 - RNA, 19 nt, Artificial Sequence
  Description of Artificial Sequence: Synthetic oligonucleotide
auggguauaguuuggaaaa

SEQ ID NO: 5943 - RNA, 19 nt, Artificial Sequence
  Description of Artificial Sequence: Synthetic oligonucleotide
uauggguauaguuuggaaa

SEQ ID NO: 5944 - RNA, 19 nt, Artificial Sequence
  Description of Artificial Sequence: Synthetic oligonucleotide
uuauggguauaguuuggaa

SEQ ID NO: 5945 - RNA, 19 nt, Artificial Sequence
  Description of Artificial Sequence: Synthetic oligonucleotide
uuuauggguauaguuugga

SEQ ID NO: 5946 - RNA, 19 nt, Artificial Sequence
  Description of Artificial Sequence: Synthetic oligonucleotide
auuuauggguauaguuugg

SEQ ID NO: 5947 - RNA, 19 nt, Artificial Sequence
  Description of Artificial Sequence: Synthetic oligonucleotide
aauuuauggguauaguuug

SEQ ID NO: 5948 - RNA, 19 nt, Artificial Sequence
  Description of Artificial Sequence: Synthetic oligonucleotide
caauuuauggguauaguuu

SEQ ID NO: 5949 - RNA, 19 nt, Artificial Sequence
  Description of Artificial Sequence: Synthetic oligonucleotide
acaauuuauggguauaguu

SEQ ID NO: 5950 - RNA, 19 nt, Artificial Sequence
  Description of Artificial Sequence: Synthetic oligonucleotide
cacaauuuauggguauagu

SEQ ID NO: 5951 - RNA, 19 nt, Artificial Sequence
  Description of Artificial Sequence: Synthetic oligonucleotide
ucacaauuuauggguauag

SEQ ID NO: 5952 - RNA, 19 nt, Artificial Sequence
  Description of Artificial Sequence: Synthetic oligonucleotide
gucacaauuuauggguaua

SEQ ID NO: 5953 - RNA, 19 nt, Artificial Sequence
  Description of Artificial Sequence: Synthetic oligonucleotide
agucacaauuuauggguau

SEQ ID NO: 5954 - RNA, 19 nt, Artificial Sequence
  Description of Artificial Sequence: Synthetic oligonucleotide
uagucacaauuuaugggua

SEQ ID NO: 5955 - RNA, 19 nt, Artificial Sequence
  Description of Artificial Sequence: Synthetic oligonucleotide
cuagucacaauuuaugggu

SEQ ID NO: 5956 - RNA, 19 nt, Artificial Sequence
  Description of Artificial Sequence: Synthetic oligonucleotide
acuagucacaauuuauggg

SEQ ID NO: 5957 - RNA, 19 nt, Artificial Sequence
  Description of Artificial Sequence: Synthetic oligonucleotide
uacuagucacaauuuaugg

SEQ ID NO: 5958 - RNA, 19 nt, Artificial Sequence
  Description of Artificial Sequence: Synthetic oligonucleotide
uuacuagucacaauuuaug

SEQ ID NO: 5959 - RNA, 19 nt, Artificial Sequence
  Description of Artificial Sequence: Synthetic oligonucleotide
uuuacuagucacaauuuau

SEQ ID NO: 5960 - RNA, 19 nt, Artificial Sequence
  Description of Artificial Sequence: Synthetic oligonucleotide
uuuuacuagucacaauuua

SEQ ID NO: 5961 - RNA, 19 nt, Artificial Sequence
  Description of Artificial Sequence: Synthetic oligonucleotide
auuuuacuagucacaauuu

SEQ ID NO: 5962 - RNA, 19 nt, Artificial Sequence
  Description of Artificial Sequence: Synthetic oligonucleotide
uauuuuacuagucacaauu

SEQ ID NO: 5963 - RNA, 19 nt, Artificial Sequence
  Description of Artificial Sequence: Synthetic oligonucleotide
guauuuuacuagucacaau

SEQ ID NO: 5964 - RNA, 19 nt, Artificial Sequence
  Description of Artificial Sequence: Synthetic oligonucleotide
aguauuuuacuagucacaa

SEQ ID NO: 5965 - RNA, 19 nt, Artificial Sequence
  Description of Artificial Sequence: Synthetic oligonucleotide
aaguauuuuacuagucaca

SEQ ID NO: 5966 - RNA, 19 nt, Artificial Sequence
  Description of Artificial Sequence: Synthetic oligonucleotide
uaaguauuuuacuagucac

SEQ ID NO: 5967 - RNA, 19 nt, Artificial Sequence
  Description of Artificial Sequence: Synthetic oligonucleotide
guaaguauuuuacuaguca

SEQ ID NO: 5968 - RNA, 19 nt, Artificial Sequence
  Description of Artificial Sequence: Synthetic oligonucleotide
uguaaguauuuuacuaguc

SEQ ID NO: 5969 - RNA, 19 nt, Artificial Sequence
  Description of Artificial Sequence: Synthetic oligonucleotide
guguaaguauuuuacuagu

SEQ ID NO: 5970 - RNA, 19 nt, Artificial Sequence
  Description of Artificial Sequence: Synthetic oligonucleotide
uguguaaguauuuuacuag

SEQ ID NO: 5971 - RNA, 19 nt, Artificial Sequence
  Description of Artificial Sequence: Synthetic oligonucleotide
cuguguaaguauuuuacua

SEQ ID NO: 5972 - RNA, 19 nt, Artificial Sequence
  Description of Artificial Sequence: Synthetic oligonucleotide
ucuguguaaguauuuuacu

SEQ ID NO: 5973 - RNA, 19 nt, Artificial Sequence
  Description of Artificial Sequence: Synthetic oligonucleotide
cucuguguaaguauuuuac

SEQ ID NO: 5974 - RNA, 19 nt, Artificial Sequence
  Description of Artificial Sequence: Synthetic oligonucleotide
gcucuguguaaguauuuua

SEQ ID NO: 5975 - RNA, 19 nt, Artificial Sequence
  Description of Artificial Sequence: Synthetic oligonucleotide
ugcucuguguaaguauuuu

SEQ ID NO: 5976 - RNA, 19 nt, Artificial Sequence
  Description of Artificial Sequence: Synthetic oligonucleotide
cugcucuguguaaguauuu

SEQ ID NO: 5977 - RNA, 19 nt, Artificial Sequence
  Description of Artificial Sequence: Synthetic oligonucleotide
ucugcucuguguaaguauu

SEQ ID NO: 5978 - RNA, 19 nt, Artificial Sequence
  Description of Artificial Sequence: Synthetic oligonucleotide
uucugcucuguguaaguau

SEQ ID NO: 5979 - RNA, 19 nt, Artificial Sequence
  Description of Artificial Sequence: Synthetic oligonucleotide
auucugcucuguguaagua

SEQ ID NO: 5980 - RNA, 19 nt, Artificial Sequence
  Description of Artificial Sequence: Synthetic oligonucleotide
aauucugcucuguguaagu

SEQ ID NO: 5981 - RNA, 19 nt, Artificial Sequence
  Description of Artificial Sequence: Synthetic oligonucleotide
aaauucugcucuguguaag

SEQ ID NO: 5982 - RNA, 19 nt, Artificial Sequence
  Description of Artificial Sequence: Synthetic oligonucleotide
aaaauucugcucuguguaa

SEQ ID NO: 5983 - RNA, 19 nt, Artificial Sequence
  Description of Artificial Sequence: Synthetic oligonucleotide
gaaaauucugcucugugua

SEQ ID NO: 5984 - RNA, 19 nt, Artificial Sequence
  Description of Artificial Sequence: Synthetic oligonucleotide
ugaaaauucugcucugugu

SEQ ID NO: 5985 - RNA, 19 nt, Artificial Sequence
  Description of Artificial Sequence: Synthetic oligonucleotide
gugaaaauucugcucugug

SEQ ID NO: 5986 - RNA, 19 nt, Artificial Sequence
  Description of Artificial Sequence: Synthetic oligonucleotide
ugugaaaauucugcucugu

SEQ ID NO: 5987 - RNA, 19 nt, Artificial Sequence
  Description of Artificial Sequence: Synthetic oligonucleotide
cugugaaaauucugcucug

SEQ ID NO: 5988 - RNA, 19 nt, Artificial Sequence
  Description of Artificial Sequence: Synthetic oligonucleotide
ucugugaaaauucugcucu

SEQ ID NO: 5989 - RNA, 19 nt, Artificial Sequence
  Description of Artificial Sequence: Synthetic oligonucleotide
aucugugaaaauucugcuc

SEQ ID NO: 5990 - RNA, 19 nt, Artificial Sequence
  Description of Artificial Sequence: Synthetic oligonucleotide
caucugugaaaauucugcu

SEQ ID NO: 5991 - RNA, 19 nt, Artificial Sequence
  Description of Artificial Sequence: Synthetic oligonucleotide
ccaucugugaaaauucugc

SEQ ID NO: 5992 - RNA, 19 nt, Artificial Sequence
  Description of Artificial Sequence: Synthetic oligonucleotide
gccaucugugaaaauucug

SEQ ID NO: 5993 - RNA, 19 nt, Artificial Sequence
  Description of Artificial Sequence: Synthetic oligonucleotide
ugccaucugugaaaauucu

SEQ ID NO: 5994 - RNA, 19 nt, Artificial Sequence
  Description of Artificial Sequence: Synthetic oligonucleotide
uugccaucugugaaaauuc

SEQ ID NO: 5995 - RNA, 19 nt, Artificial Sequence
  Description of Artificial Sequence: Synthetic oligonucleotide
uuugccaucugugaaaauu

SEQ ID NO: 5996 - RNA, 19 nt, Artificial Sequence
  Description of Artificial Sequence: Synthetic oligonucleotide
uuuugccaucugugaaaau

SEQ ID NO: 5997 - RNA, 19 nt, Artificial Sequence
  Description of Artificial Sequence: Synthetic oligonucleotide
uuuuugccaucugugaaaa

SEQ ID NO: 5998 - RNA, 19 nt, Artificial Sequence
  Description of Artificial Sequence: Synthetic oligonucleotide
uuuuuugccaucugugaaa

SEQ ID NO: 5999 - RNA, 19 nt, Artificial Sequence
  Description of Artificial Sequence: Synthetic oligonucleotide
uuuuuuugccaucugugaa

SEQ ID NO: 6000 - RNA, 19 nt, Artificial Sequence
  Description of Artificial Sequence: Synthetic oligonucleotide
auuuuuuugccaucuguga

SEQ ID NO: 6001 - RNA, 19 nt, Artificial Sequence
  Description of Artificial Sequence: Synthetic oligonucleotide
aauuuuuuugccaucugug

SEQ ID NO: 6002 - RNA, 19 nt, Artificial Sequence
  Description of Artificial Sequence: Synthetic oligonucleotide
aaauuuuuuugccaucugu

SEQ ID NO: 6003 - RNA, 19 nt, Artificial Sequence
  Description of Artificial Sequence: Synthetic oligonucleotide
uaaauuuuuuugccaucug

SEQ ID NO: 6004 - RNA, 19 nt, Artificial Sequence
  Description of Artificial Sequence: Synthetic oligonucleotide
uuaaauuuuuuugccaucu

SEQ ID NO: 6005 - RNA, 19 nt, Artificial Sequence
  Description of Artificial Sequence: Synthetic oligonucleotide
uuuaaauuuuuuugccauc

SEQ ID NO: 6006 - RNA, 19 nt, Artificial Sequence
  Description of Artificial Sequence: Synthetic oligonucleotide
cuuuaaauuuuuuugccau

SEQ ID NO: 6007 - RNA, 19 nt, Artificial Sequence
  Description of Artificial Sequence: Synthetic oligonucleotide
ucuuuaaauuuuuuugcca

SEQ ID NO: 6008 - RNA, 19 nt, Artificial Sequence
  Description of Artificial Sequence: Synthetic oligonucleotide
aucuuuaaauuuuuuugcc

SEQ ID NO: 6009 - RNA, 19 nt, Artificial Sequence
  Description of Artificial Sequence: Synthetic oligonucleotide
caucuuuaaauuuuuuugc

SEQ ID NO: 6010 - RNA, 19 nt, Artificial Sequence
  Description of Artificial Sequence: Synthetic oligonucleotide
acaucuuuaaauuuuuuug

SEQ ID NO: 6011 - RNA, 19 nt, Artificial Sequence
  Description of Artificial Sequence: Synthetic oligonucleotide
gacaucuuuaaauuuuuuu

SEQ ID NO: 6012 - RNA, 19 nt, Artificial Sequence
  Description of Artificial Sequence: Synthetic oligonucleotide
ggacaucuuuaaauuuuuu

SEQ ID NO: 6013 - RNA, 19 nt, Artificial Sequence
  Description of Artificial Sequence: Synthetic oligonucleotide
uggacaucuuuaaauuuuu

SEQ ID NO: 6014 - RNA, 19 nt, Artificial Sequence
  Description of Artificial Sequence: Synthetic oligonucleotide
uuggacaucuuuaaauuuu

SEQ ID NO: 6015 - RNA, 19 nt, Artificial Sequence
  Description of Artificial Sequence: Synthetic oligonucleotide
auuggacaucuuuaaauuu

SEQ ID NO: 6016 - RNA, 19 nt, Artificial Sequence
  Description of Artificial Sequence: Synthetic oligonucleotide
uauuggacaucuuuaaauu

SEQ ID NO: 6017 - RNA, 19 nt, Artificial Sequence
  Description of Artificial Sequence: Synthetic oligonucleotide
auauuggacaucuuuaaau

SEQ ID NO: 6018 - RNA, 19 nt, Artificial Sequence
  Description of Artificial Sequence: Synthetic oligonucleotide
uauauuggacaucuuuaaa

SEQ ID NO: 6019 - RNA, 19 nt, Artificial Sequence
  Description of Artificial Sequence: Synthetic oligonucleotide
auauauuggacaucuuuaa

SEQ ID NO: 6020 - RNA, 19 nt, Artificial Sequence
  Description of Artificial Sequence: Synthetic oligonucleotide
cauauauuggacaucuuua

SEQ ID NO: 6021 - RNA, 19 nt, Artificial Sequence
  Description of Artificial Sequence: Synthetic oligonucleotide
acauauauuggacaucuuu

SEQ ID NO: 6022 - RNA, 19 nt, Artificial Sequence
  Description of Artificial Sequence: Synthetic oligonucleotide
cacauauauuggacaucuu

SEQ ID NO: 6023 - RNA, 19 nt, Artificial Sequence
  Description of Artificial Sequence: Synthetic oligonucleotide
ccacauauauuggacaucu

SEQ ID NO: 6024 - RNA, 19 nt, Artificial Sequence
  Description of Artificial Sequence: Synthetic oligonucleotide
cccacauauauuggacauc

SEQ ID NO: 6025 - RNA, 19 nt, Artificial Sequence
  Description of Artificial Sequence: Synthetic oligonucleotide
ucccacauauauuggacau

SEQ ID NO: 6026 - RNA, 19 nt, Artificial Sequence
  Description of Artificial Sequence: Synthetic oligonucleotide
uucccacauauauuggaca

SEQ ID NO: 6027 - RNA, 19 nt, Artificial Sequence
  Description of Artificial Sequence: Synthetic oligonucleotide
uuucccacauauauuggac

SEQ ID NO: 6028 - RNA, 19 nt, Artificial Sequence
  Description of Artificial Sequence: Synthetic oligonucleotide
uuuucccacauauauugga

SEQ ID NO: 6029 - RNA, 19 nt, Artificial Sequence
  Description of Artificial Sequence: Synthetic oligonucleotide
cuuuucccacauauauugg

SEQ ID NO: 6030 - RNA, 19 nt, Artificial Sequence
  Description of Artificial Sequence: Synthetic oligonucleotide
ucuuuucccacauauauug

SEQ ID NO: 6031 - RNA, 19 nt, Artificial Sequence
  Description of Artificial Sequence: Synthetic oligonucleotide
cucuuuucccacauauauu

SEQ ID NO: 6032 - RNA, 19 nt, Artificial Sequence
  Description of Artificial Sequence: Synthetic oligonucleotide
gcucuuuucccacauauau

SEQ ID NO: 6033 - RNA, 19 nt, Artificial Sequence
  Description of Artificial Sequence: Synthetic oligonucleotide
agcucuuuucccacauaua

SEQ ID NO: 6034 - RNA, 19 nt, Artificial Sequence
  Description of Artificial Sequence: Synthetic oligonucleotide
uagcucuuuucccacauau

SEQ ID NO: 6035 - RNA, 19 nt, Artificial Sequence
  Description of Artificial Sequence: Synthetic oligonucleotide
uuagcucuuuucccacaua

SEQ ID NO: 6036 - RNA, 19 nt, Artificial Sequence
  Description of Artificial Sequence: Synthetic oligonucleotide
guuagcucuuuucccacau

SEQ ID NO: 6037 - RNA, 19 nt, Artificial Sequence
  Description of Artificial Sequence: Synthetic oligonucleotide
uguuagcucuuuucccaca

SEQ ID NO: 6038 - RNA, 19 nt, Artificial Sequence
  Description of Artificial Sequence: Synthetic oligonucleotide
cuguuagcucuuuucccac

SEQ ID NO: 6039 - RNA, 19 nt, Artificial Sequence
  Description of Artificial Sequence: Synthetic oligonucleotide
ucuguuagcucuuuuccca

SEQ ID NO: 6040 - RNA, 19 nt, Artificial Sequence
  Description of Artificial Sequence: Synthetic oligonucleotide
cucuguuagcucuuuuccc

SEQ ID NO: 6041 - RNA, 19 nt, Artificial Sequence
  Description of Artificial Sequence: Synthetic oligonucleotide
ucucuguuagcucuuuucc

SEQ ID NO: 6042 - RNA, 19 nt, Artificial Sequence
  Description of Artificial Sequence: Synthetic oligonucleotide
cucucuguuagcucuuuuc

SEQ ID NO: 6043 - RNA, 19 nt, Artificial Sequence
  Description of Artificial Sequence: Synthetic oligonucleotide
ucucucuguuagcucuuuu

SEQ ID NO: 6044 - RNA, 19 nt, Artificial Sequence
  Description of Artificial Sequence: Synthetic oligonucleotide
aucucucuguuagcucuuu

SEQ ID NO: 6045 - RNA, 19 nt, Artificial Sequence
  Description of Artificial Sequence: Synthetic oligonucleotide
gaucucucuguuagcucuu

SEQ ID NO: 6046 - RNA, 19 nt, Artificial Sequence
  Description of Artificial Sequence: Synthetic oligonucleotide
ugaucucucuguuagcucu

SEQ ID NO: 6047 - RNA, 19 nt, Artificial Sequence
  Description of Artificial Sequence: Synthetic oligonucleotide
augaucucucuguuagcuc

SEQ ID NO: 6048 - RNA, 19 nt, Artificial Sequence
  Description of Artificial Sequence: Synthetic oligonucleotide
aaugaucucucuguuagcu

SEQ ID NO: 6049 - RNA, 19 nt, Artificial Sequence
  Description of Artificial Sequence: Synthetic oligonucleotide
uaaugaucucucuguuagc

SEQ ID NO: 6050 - RNA, 19 nt, Artificial Sequence
  Description of Artificial Sequence: Synthetic oligonucleotide
auaaugaucucucuguuag

SEQ ID NO: 6051 - RNA, 19 nt, Artificial Sequence
  Description of Artificial Sequence: Synthetic oligonucleotide
aauaaugaucucucuguua

SEQ ID NO: 6052 - RNA, 19 nt, Artificial Sequence
  Description of Artificial Sequence: Synthetic oligonucleotide
aaauaaugaucucucuguu

SEQ ID NO: 6053 - RNA, 19 nt, Artificial Sequence
  Description of Artificial Sequence: Synthetic oligonucleotide
gaaauaaugaucucucugu

SEQ ID NO: 6054 - RNA, 19 nt, Artificial Sequence
  Description of Artificial Sequence: Synthetic oligonucleotide
agaaauaaugaucucucug

SEQ ID NO: 6055 - RNA, 19 nt, Artificial Sequence
  Description of Artificial Sequence: Synthetic oligonucleotide
aagaaauaaugaucucucu

SEQ ID NO: 6056 - RNA, 19 nt, Artificial Sequence
  Description of Artificial Sequence: Synthetic oligonucleotide
uaagaaauaaugaucucuc

SEQ ID NO: 6057 - RNA, 19 nt, Artificial Sequence
  Description of Artificial Sequence: Synthetic oligonucleotide
uuaagaaauaaugaucucu

SEQ ID NO: 6058 - RNA, 19 nt, Artificial Sequence
  Description of Artificial Sequence: Synthetic oligonucleotide
uuuaagaaauaaugaucuc

SEQ ID NO: 6059 - RNA, 19 nt, Artificial Sequence
  Description of Artificial Sequence: Synthetic oligonucleotide
cuuuaagaaauaaugaucu

SEQ ID NO: 6060 - RNA, 19 nt, Artificial Sequence
  Description of Artificial Sequence: Synthetic oligonucleotide
ucuuuaagaaauaaugauc

SEQ ID NO: 6061 - RNA, 19 nt, Artificial Sequence
  Description of Artificial Sequence: Synthetic oligonucleotide
aucuuuaagaaauaaugau

SEQ ID NO: 6062 - RNA, 19 nt, Artificial Sequence
  Description of Artificial Sequence: Synthetic oligonucleotide
aaucuuuaagaaauaauga

SEQ ID NO: 6063 - RNA, 19 nt, Artificial Sequence
  Description of Artificial Sequence: Synthetic oligonucleotide
caaucuuuaagaaauaaug

SEQ ID NO: 6064 - RNA, 19 nt, Artificial Sequence
  Description of Artificial Sequence: Synthetic oligonucleotide
ccaaucuuuaagaaauaau

SEQ ID NO: 6065 - RNA, 19 nt, Artificial Sequence
  Description of Artificial Sequence: Synthetic oligonucleotide
gccaaucuuuaagaaauaa

SEQ ID NO: 6066 - RNA, 19 nt, Artificial Sequence
  Description of Artificial Sequence: Synthetic oligonucleotide
ggccaaucuuuaagaaaua

SEQ ID NO: 6067 - RNA, 19 nt, Artificial Sequence
  Description of Artificial Sequence: Synthetic oligonucleotide
uggccaaucuuuaagaaau

SEQ ID NO: 6068 - RNA, 19 nt, Artificial Sequence
  Description of Artificial Sequence: Synthetic oligonucleotide
auggccaaucuuuaagaaa

SEQ ID NO: 6069 - RNA, 19 nt, Artificial Sequence
  Description of Artificial Sequence: Synthetic oligonucleotide
uauggccaaucuuuaagaa

SEQ ID NO: 6070 - RNA, 19 nt, Artificial Sequence
  Description of Artificial Sequence: Synthetic oligonucleotide
uuauggccaaucuuuaaga

SEQ ID NO: 6071 - RNA, 19 nt, Artificial Sequence
  Description of Artificial Sequence: Synthetic oligonucleotide
guuauggccaaucuuuaag

SEQ ID NO: 6072 - RNA, 19 nt, Artificial Sequence
  Description of Artificial Sequence: Synthetic oligonucleotide
gguuauggccaaucuuuaa

SEQ ID NO: 6073 - RNA, 19 nt, Artificial Sequence
  Description of Artificial Sequence: Synthetic oligonucleotide
agguuauggccaaucuuua

SEQ ID NO: 6074 - RNA, 19 nt, Artificial Sequence
  Description of Artificial Sequence: Synthetic oligonucleotide
cagguuauggccaaucuuu

SEQ ID NO: 6075 - RNA, 19 nt, Artificial Sequence
  Description of Artificial Sequence: Synthetic oligonucleotide
acagguuauggccaaucuu

SEQ ID NO: 6076 - RNA, 19 nt, Artificial Sequence
  Description of Artificial Sequence: Synthetic oligonucleotide
uacagguuauggccaaucu

SEQ ID NO: 6077 - RNA, 19 nt, Artificial Sequence
  Description of Artificial Sequence: Synthetic oligonucleotide
auacagguuauggccaauc

SEQ ID NO: 6078 - RNA, 19 nt, Artificial Sequence
  Description of Artificial Sequence: Synthetic oligonucleotide
aauacagguuauggccaau

SEQ ID NO: 6079 - RNA, 19 nt, Artificial Sequence
  Description of Artificial Sequence: Synthetic oligonucleotide
aaauacagguuauggccaa

SEQ ID NO: 6080 - RNA, 19 nt, Artificial Sequence
  Description of Artificial Sequence: Synthetic oligonucleotide
aaaauacagguuauggcca

SEQ ID NO: 6081 - RNA, 19 nt, Artificial Sequence
  Description of Artificial Sequence: Synthetic oligonucleotide
caaaauacagguuauggcc

SEQ ID NO: 6082 - RNA, 19 nt, Artificial Sequence
  Description of Artificial Sequence: Synthetic oligonucleotide
ucaaaauacagguuauggc

SEQ ID NO: 6083 - RNA, 19 nt, Artificial Sequence
  Description of Artificial Sequence: Synthetic oligonucleotide
aucaaaauacagguuaugg

SEQ ID NO: 6084 - RNA, 19 nt, Artificial Sequence
  Description of Artificial Sequence: Synthetic oligonucleotide
uaucaaaauacagguuaug

SEQ ID NO: 6085 - RNA, 19 nt, Artificial Sequence
  Description of Artificial Sequence: Synthetic oligonucleotide
cuaucaaaauacagguuau

SEQ ID NO: 6086 - RNA, 19 nt, Artificial Sequence
  Description of Artificial Sequence: Synthetic oligonucleotide
ucuaucaaaauacagguua

SEQ ID NO: 6087 - RNA, 19 nt, Artificial Sequence
  Description of Artificial Sequence: Synthetic oligonucleotide
uucuaucaaaauacagguu

SEQ ID NO: 6088 - RNA, 19 nt, Artificial Sequence
  Description of Artificial Sequence: Synthetic oligonucleotide
auucuaucaaaauacaggu

SEQ ID NO: 6089 - RNA, 19 nt, Artificial Sequence
  Description of Artificial Sequence: Synthetic oligonucleotide
aauucuaucaaaauacagg

SEQ ID NO: 6090 - RNA, 19 nt, Artificial Sequence
  Description of Artificial Sequence: Synthetic oligonucleotide
uaauucuaucaaaauacag

SEQ ID NO: 6091 - RNA, 19 nt, Artificial Sequence
  Description of Artificial Sequence: Synthetic oligonucleotide
cuaauucuaucaaaauaca

SEQ ID NO: 6092 - RNA, 19 nt, Artificial Sequence
  Description of Artificial Sequence: Synthetic oligonucleotide
ucuaauucuaucaaaauac

SEQ ID NO: 6093 - RNA, 19 nt, Artificial Sequence
  Description of Artificial Sequence: Synthetic oligonucleotide
aucuaauucuaucaaaaua

SEQ ID NO: 6094 - RNA, 19 nt, Artificial Sequence
  Description of Artificial Sequence: Synthetic oligonucleotide
aaucuaauucuaucaaaau

SEQ ID NO: 6095 - RNA, 19 nt, Artificial Sequence
  Description of Artificial Sequence: Synthetic oligonucleotide
caaucuaauucuaucaaaa

SEQ ID NO: 6096 - RNA, 19 nt, Artificial Sequence
  Description of Artificial Sequence: Synthetic oligonucleotide
ccaaucuaauucuaucaaa

SEQ ID NO: 6097 - RNA, 19 nt, Artificial Sequence
  Description of Artificial Sequence: Synthetic oligonucleotide
accaaucuaauucuaucaa

SEQ ID NO: 6098 - RNA, 19 nt, Artificial Sequence
  Description of Artificial Sequence: Synthetic oligonucleotide
uaccaaucuaauucuauca

SEQ ID NO: 6099 - RNA, 19 nt, Artificial Sequence
  Description of Artificial Sequence: Synthetic oligonucleotide
uuaccaaucuaauucuauc

SEQ ID NO: 6100 - RNA, 19 nt, Artificial Sequence
  Description of Artificial Sequence: Synthetic oligonucleotide
uuuaccaaucuaauucuau

SEQ ID NO: 6101 - RNA, 19 nt, Artificial Sequence
  Description of Artificial Sequence: Synthetic oligonucleotide
auuuaccaaucuaauucua

SEQ ID NO: 6102 - RNA, 19 nt, Artificial Sequence
  Description of Artificial Sequence: Synthetic oligonucleotide
uauuuaccaaucuaauucu

SEQ ID NO: 6103 - RNA, 19 nt, Artificial Sequence
  Description of Artificial Sequence: Synthetic oligonucleotide
guauuuaccaaucuaauuc

SEQ ID NO: 6104 - RNA, 19 nt, Artificial Sequence
  Description of Artificial Sequence: Synthetic oligonucleotide
uguauuuaccaaucuaauu

SEQ ID NO: 6105 - RNA, 19 nt, Artificial Sequence
  Description of Artificial Sequence: Synthetic oligonucleotide
auguauuuaccaaucuaau

SEQ ID NO: 6106 - RNA, 19 nt, Artificial Sequence
  Description of Artificial Sequence: Synthetic oligonucleotide
cauguauuuaccaaucuaa

SEQ ID NO: 6107 - RNA, 19 nt, Artificial Sequence
  Description of Artificial Sequence: Synthetic oligonucleotide
acauguauuuaccaaucua

SEQ ID NO: 6108 - RNA, 19 nt, Artificial Sequence
  Description of Artificial Sequence: Synthetic oligonucleotide
uacauguauuuaccaaucu

SEQ ID NO: 6109 - RNA, 19 nt, Artificial Sequence
  Description of Artificial Sequence: Synthetic oligonucleotide
auacauguauuuaccaauc

SEQ ID NO: 6110 - RNA, 19 nt, Artificial Sequence
  Description of Artificial Sequence: Synthetic oligonucleotide
aauacauguauuuaccaau

SEQ ID NO: 6111 - RNA, 19 nt, Artificial Sequence
  Description of Artificial Sequence: Synthetic oligonucleotide
gaauacauguauuuaccaa

SEQ ID NO: 6112 - RNA, 19 nt, Artificial Sequence
  Description of Artificial Sequence: Synthetic oligonucleotide
ugaauacauguauuuacca

SEQ ID NO: 6113 - RNA, 19 nt, Artificial Sequence
  Description of Artificial Sequence: Synthetic oligonucleotide
augaauacauguauuuacc

SEQ ID NO: 6114 - RNA, 19 nt, Artificial Sequence
  Description of Artificial Sequence: Synthetic oligonucleotide
uaugaauacauguauuuac

SEQ ID NO: 6115 - RNA, 19 nt, Artificial Sequence
  Description of Artificial Sequence: Synthetic oligonucleotide
guaugaauacauguauuua

SEQ ID NO: 6116 - RNA, 19 nt, Artificial Sequence
  Description of Artificial Sequence: Synthetic oligonucleotide
uguaugaauacauguauuu

SEQ ID NO: 6117 - RNA, 19 nt, Artificial Sequence
  Description of Artificial Sequence: Synthetic oligonucleotide
auguaugaauacauguauu

SEQ ID NO: 6118 - RNA, 19 nt, Artificial Sequence
  Description of Artificial Sequence: Synthetic oligonucleotide
uauguaugaauacauguau

SEQ ID NO: 6119 - RNA, 19 nt, Artificial Sequence
  Description of Artificial Sequence: Synthetic oligonucleotide
guauguaugaauacaugua

SEQ ID NO: 6120 - RNA, 19 nt, Artificial Sequence
  Description of Artificial Sequence: Synthetic oligonucleotide
aguauguaugaauacaugu

SEQ ID NO: 6121 - RNA, 19 nt, Artificial Sequence
  Description of Artificial Sequence: Synthetic oligonucleotide
gaguauguaugaauacaug

SEQ ID NO: 6122 - RNA, 19 nt, Artificial Sequence
  Description of Artificial Sequence: Synthetic oligonucleotide
agaguauguaugaauacau

SEQ ID NO: 6123 - RNA, 19 nt, Artificial Sequence
  Description of Artificial Sequence: Synthetic oligonucleotide
cagaguauguaugaauaca

SEQ ID NO: 6124 - RNA, 19 nt, Artificial Sequence
  Description of Artificial Sequence: Synthetic oligonucleotide
acagaguauguaugaauac

SEQ ID NO: 6125 - RNA, 19 nt, Artificial Sequence
  Description of Artificial Sequence: Synthetic oligonucleotide
cacagaguauguaugaaua

SEQ ID NO: 6126 - RNA, 19 nt, Artificial Sequence
  Description of Artificial Sequence: Synthetic oligonucleotide
ccacagaguauguaugaau

SEQ ID NO: 6127 - RNA, 19 nt, Artificial Sequence
  Description of Artificial Sequence: Synthetic oligonucleotide
accacagaguauguaugaa

SEQ ID NO: 6128 - RNA, 19 nt, Artificial Sequence
  Description of Artificial Sequence: Synthetic oligonucleotide
uaccacagaguauguauga

SEQ ID NO: 6129 - RNA, 19 nt, Artificial Sequence
  Description of Artificial Sequence: Synthetic oligonucleotide
uuaccacagaguauguaug

SEQ ID NO: 6130 - RNA, 19 nt, Artificial Sequence
  Description of Artificial Sequence: Synthetic oligonucleotide
auuaccacagaguauguau

SEQ ID NO: 6131 - RNA, 19 nt, Artificial Sequence
  Description of Artificial Sequence: Synthetic oligonucleotide
uauuaccacagaguaugua

SEQ ID NO: 6132 - RNA, 19 nt, Artificial Sequence
  Description of Artificial Sequence: Synthetic oligonucleotide
cuauuaccacagaguaugu

SEQ ID NO: 6133 - RNA, 19 nt, Artificial Sequence
  Description of Artificial Sequence: Synthetic oligonucleotide
ucuauuaccacagaguaug

SEQ ID NO: 6134 - RNA, 19 nt, Artificial Sequence
  Description of Artificial Sequence: Synthetic oligonucleotide
cucuauuaccacagaguau

SEQ ID NO: 6135 - RNA, 19 nt, Artificial Sequence
  Description of Artificial Sequence: Synthetic oligonucleotide
ucucuauuaccacagagua

SEQ ID NO: 6136 - RNA, 19 nt, Artificial Sequence
  Description of Artificial Sequence: Synthetic oligonucleotide
gucucuauuaccacagagu

SEQ ID NO: 6137 - RNA, 19 nt, Artificial Sequence
  Description of Artificial Sequence: Synthetic oligonucleotide
agucucuauuaccacagag

SEQ ID NO: 6138 - RNA, 19 nt, Artificial Sequence
  Description of Artificial Sequence: Synthetic oligonucleotide
aagucucuauuaccacaga

SEQ ID NO: 6139 - RNA, 19 nt, Artificial Sequence
  Description of Artificial Sequence: Synthetic oligonucleotide
caagucucuauuaccacag

SEQ ID NO: 6140 - RNA, 19 nt, Artificial Sequence
  Description of Artificial Sequence: Synthetic oligonucleotide
ucaagucucuauuaccaca

SEQ ID NO: 6141 - RNA, 19 nt, Artificial Sequence
  Description of Artificial Sequence: Synthetic oligonucleotide
cucaagucucuauuaccac

SEQ ID NO: 6142 - RNA, 19 nt, Artificial Sequence
  Description of Artificial Sequence: Synthetic oligonucleotide
gcucaagucucuauuacca

SEQ ID NO: 6143 - RNA, 19 nt, Artificial Sequence
  Description of Artificial Sequence: Synthetic oligonucleotide
agcucaagucucuauuacc

SEQ ID NO: 6144 - RNA, 19 nt, Artificial Sequence
  Description of Artificial Sequence: Synthetic oligonucleotide
cagcucaagucucuauuac

SEQ ID NO: 6145 - RNA, 19 nt, Artificial Sequence
  Description of Artificial Sequence: Synthetic oligonucleotide
ccagcucaagucucuauua

SEQ ID NO: 6146 - RNA, 19 nt, Artificial Sequence
  Description of Artificial Sequence: Synthetic oligonucleotide
uccagcucaagucucuauu

SEQ ID NO: 6147 - RNA, 19 nt, Artificial Sequence
  Description of Artificial Sequence: Synthetic oligonucleotide
auccagcucaagucucuau

SEQ ID NO: 6148 - RNA, 19 nt, Artificial Sequence
  Description of Artificial Sequence: Synthetic oligonucleotide
gauccagcucaagucucua

SEQ ID NO: 6149 - RNA, 19 nt, Artificial Sequence
  Description of Artificial Sequence: Synthetic oligonucleotide
agauccagcucaagucucu

SEQ ID NO: 6150 - RNA, 19 nt, Artificial Sequence
  Description of Artificial Sequence: Synthetic oligonucleotide
cagauccagcucaagucuc

SEQ ID NO: 6151 - RNA, 19 nt, Artificial Sequence
  Description of Artificial Sequence: Synthetic oligonucleotide
acagauccagcucaagucu

SEQ ID NO: 6152 - RNA, 19 nt, Artificial Sequence
  Description of Artificial Sequence: Synthetic oligonucleotide
uacagauccagcucaaguc

SEQ ID NO: 6153 - RNA, 19 nt, Artificial Sequence
  Description of Artificial Sequence: Synthetic oligonucleotide
guacagauccagcucaagu

SEQ ID NO: 6154 - RNA, 19 nt, Artificial Sequence
  Description of Artificial Sequence: Synthetic oligonucleotide
aguacagauccagcucaag

SEQ ID NO: 6155 - RNA, 19 nt, Artificial Sequence
  Description of Artificial Sequence: Synthetic oligonucleotide
caguacagauccagcucaa

SEQ ID NO: 6156 - RNA, 19 nt, Artificial Sequence
  Description of Artificial Sequence: Synthetic oligonucleotide
gcaguacagauccagcuca

SEQ ID NO: 6157 - RNA, 19 nt, Artificial Sequence
  Description of Artificial Sequence: Synthetic oligonucleotide
ugcaguacagauccagcuc

SEQ ID NO: 6158 - RNA, 19 nt, Artificial Sequence
  Description of Artificial Sequence: Synthetic oligonucleotide
gugcaguacagauccagcu

SEQ ID NO: 6159 - RNA, 19 nt, Artificial Sequence
  Description of Artificial Sequence: Synthetic oligonucleotide
agugcaguacagauccagc

SEQ ID NO: 6160 - RNA, 19 nt, Artificial Sequence
  Description of Artificial Sequence: Synthetic oligonucleotide
cagugcaguacagauccag

SEQ ID NO: 6161 - RNA, 19 nt, Artificial Sequence
  Description of Artificial Sequence: Synthetic oligonucleotide
ccagugcaguacagaucca

SEQ ID NO: 6162 - RNA, 19 nt, Artificial Sequence
  Description of Artificial Sequence: Synthetic oligonucleotide
uccagugcaguacagaucc

SEQ ID NO: 6163 - RNA, 19 nt, Artificial Sequence
  Description of Artificial Sequence: Synthetic oligonucleotide
cuccagugcaguacagauc

SEQ ID NO: 6164 - RNA, 19 nt, Artificial Sequence
  Description of Artificial Sequence: Synthetic oligonucleotide
acuccagugcaguacagau

SEQ ID NO: 6165 - RNA, 19 nt, Artificial Sequence
  Description of Artificial Sequence: Synthetic oligonucleotide
uacuccagugcaguacaga

SEQ ID NO: 6166 - RNA, 19 nt, Artificial Sequence
  Description of Artificial Sequence: Synthetic oligonucleotide
uuacuccagugcaguacag

SEQ ID NO: 6167 - RNA, 19 nt, Artificial Sequence
  Description of Artificial Sequence: Synthetic oligonucleotide
cuuacuccagugcaguaca

SEQ ID NO: 6168 - RNA, 19 nt, Artificial Sequence
  Description of Artificial Sequence: Synthetic oligonucleotide
gcuuacuccagugcaguac

SEQ ID NO: 6169 - RNA, 19 nt, Artificial Sequence
  Description of Artificial Sequence: Synthetic oligonucleotide
ugcuuacuccagugcagua

SEQ ID NO: 6170 - RNA, 19 nt, Artificial Sequence
  Description of Artificial Sequence: Synthetic oligonucleotide
uugcuuacuccagugcagu

SEQ ID NO: 6171 - RNA, 19 nt, Artificial Sequence
  Description of Artificial Sequence: Synthetic oligonucleotide
cuugcuuacuccagugcag

SEQ ID NO: 6172 - RNA, 19 nt, Artificial Sequence
  Description of Artificial Sequence: Synthetic oligonucleotide
ucuugcuuacuccagugca

SEQ ID NO: 6173 - RNA, 19 nt, Artificial Sequence
  Description of Artificial Sequence: Synthetic oligonucleotide
uucuugcuuacuccagugc

SEQ ID NO: 6174 - RNA, 19 nt, Artificial Sequence
  Description of Artificial Sequence: Synthetic oligonucleotide
uuucuugcuuacuccagug

SEQ ID NO: 6175 - RNA, 19 nt, Artificial Sequence
  Description of Artificial Sequence: Synthetic oligonucleotide
uuuucuugcuuacuccagu

SEQ ID NO: 6176 - RNA, 19 nt, Artificial Sequence
  Description of Artificial Sequence: Synthetic oligonucleotide
auuuucuugcuuacuccag

SEQ ID NO: 6177 - RNA, 19 nt, Artificial Sequence
  Description of Artificial Sequence: Synthetic oligonucleotide
aauuuucuugcuuacucca

SEQ ID NO: 6178 - RNA, 19 nt, Artificial Sequence
  Description of Artificial Sequence: Synthetic oligonucleotide
caauuuucuugcuuacucc

SEQ ID NO: 6179 - RNA, 19 nt, Artificial Sequence
  Description of Artificial Sequence: Synthetic oligonucleotide
ccaauuuucuugcuuacuc

SEQ ID NO: 6180 - RNA, 19 nt, Artificial Sequence
  Description of Artificial Sequence: Synthetic oligonucleotide
cccaauuuucuugcuuacu

SEQ ID NO: 6181 - RNA, 19 nt, Artificial Sequence
  Description of Artificial Sequence: Synthetic oligonucleotide
ucccaauuuucuugcuuac

SEQ ID NO: 6182 - RNA, 19 nt, Artificial Sequence
  Description of Artificial Sequence: Synthetic oligonucleotide
uucccaauuuucuugcuua

SEQ ID NO: 6183 - RNA, 19 nt, Artificial Sequence
  Description of Artificial Sequence: Synthetic oligonucleotide
uuucccaauuuucuugcuu

SEQ ID NO: 6184 - RNA, 19 nt, Artificial Sequence
  Description of Artificial Sequence: Synthetic oligonucleotide
uuuucccaauuuucuugcu

SEQ ID NO: 6185 - RNA, 19 nt, Artificial Sequence
  Description of Artificial Sequence: Synthetic oligonucleotide
guuuucccaauuuucuugc

SEQ ID NO: 6186 - RNA, 19 nt, Artificial Sequence
  Description of Artificial Sequence: Synthetic oligonucleotide
aguuuucccaauuuucuug

SEQ ID NO: 6187 - RNA, 19 nt, Artificial Sequence
  Description of Artificial Sequence: Synthetic oligonucleotide
aaguuuucccaauuuucuu

SEQ ID NO: 6188 - RNA, 19 nt, Artificial Sequence
  Description of Artificial Sequence: Synthetic oligonucleotide
aaaguuuucccaauuuucu

SEQ ID NO: 6189 - RNA, 19 nt, Artificial Sequence
  Description of Artificial Sequence: Synthetic oligonucleotide
aaaaguuuucccaauuuuc

SEQ ID NO: 6190 - RNA, 19 nt, Artificial Sequence
  Description of Artificial Sequence: Synthetic oligonucleotide
aaaaaguuuucccaauuuu

SEQ ID NO: 6191 - RNA, 19 nt, Artificial Sequence
  Description of Artificial Sequence: Synthetic oligonucleotide
gaaaaaguuuucccaauuu

SEQ ID NO: 6192 - RNA, 19 nt, Artificial Sequence
  Description of Artificial Sequence: Synthetic oligonucleotide
cgaaaaaguuuucccaauu

SEQ ID NO: 6193 - RNA, 19 nt, Artificial Sequence
  Description of Artificial Sequence: Synthetic oligonucleotide
acgaaaaaguuuucccaau

SEQ ID NO: 6194 - RNA, 19 nt, Artificial Sequence
  Description of Artificial Sequence: Synthetic oligonucleotide
aacgaaaaaguuuucccaa

SEQ ID NO: 6195 - RNA, 19 nt, Artificial Sequence
  Description of Artificial Sequence: Synthetic oligonucleotide
aaacgaaaaaguuuuccca

SEQ ID NO: 6196 - RNA, 19 nt, Artificial Sequence
  Description of Artificial Sequence: Synthetic oligonucleotide
caaacgaaaaaguuuuccc

SEQ ID NO: 6197 - RNA, 19 nt, Artificial Sequence
  Description of Artificial Sequence: Synthetic oligonucleotide
acaaacgaaaaaguuuucc

SEQ ID NO: 6198 - RNA, 19 nt, Artificial Sequence
  Description of Artificial Sequence: Synthetic oligonucleotide
aacaaacgaaaaaguuuuc

SEQ ID NO: 6199 - RNA, 19 nt, Artificial Sequence
  Description of Artificial Sequence: Synthetic oligonucleotide
gaacaaacgaaaaaguuuu

SEQ ID NO: 6200 - RNA, 19 nt, Artificial Sequence
  Description of Artificial Sequence: Synthetic oligonucleotide
ugaacaaacgaaaaaguuu

SEQ ID NO: 6201 - RNA, 19 nt, Artificial Sequence
  Description of Artificial Sequence: Synthetic oligonucleotide
cugaacaaacgaaaaaguu

SEQ ID NO: 6202 - RNA, 19 nt, Artificial Sequence
  Description of Artificial Sequence: Synthetic oligonucleotide
ccugaacaaacgaaaaagu

SEQ ID NO: 6203 - RNA, 19 nt, Artificial Sequence
  Description of Artificial Sequence: Synthetic oligonucleotide
accugaacaaacgaaaaag

SEQ ID NO: 6204 - RNA, 19 nt, Artificial Sequence
  Description of Artificial Sequence: Synthetic oligonucleotide
aaccugaacaaacgaaaaa

SEQ ID NO: 6205 - RNA, 19 nt, Artificial Sequence
  Description of Artificial Sequence: Synthetic oligonucleotide
aaaccugaacaaacgaaaa

SEQ ID NO: 6206 - RNA, 19 nt, Artificial Sequence
  Description of Artificial Sequence: Synthetic oligonucleotide
aaaaccugaacaaacgaaa

SEQ ID NO: 6207 - RNA, 19 nt, Artificial Sequence
  Description of Artificial Sequence: Synthetic oligonucleotide
caaaaccugaacaaacgaa

SEQ ID NO: 6208 - RNA, 19 nt, Artificial Sequence
  Description of Artificial Sequence: Synthetic oligonucleotide
ccaaaaccugaacaaacga

SEQ ID NO: 6209 - RNA, 19 nt, Artificial Sequence
  Description of Artificial Sequence: Synthetic oligonucleotide
gccaaaaccugaacaaacg

SEQ ID NO: 6210 - RNA, 19 nt, Artificial Sequence
  Description of Artificial Sequence: Synthetic oligonucleotide
ugccaaaaccugaacaaac

SEQ ID NO: 6211 - RNA, 19 nt, Artificial Sequence
  Description of Artificial Sequence: Synthetic oligonucleotide
uugccaaaaccugaacaaa

SEQ ID NO: 6212 - RNA, 19 nt, Artificial Sequence
  Description of Artificial Sequence: Synthetic oligonucleotide
guugccaaaaccugaacaa

SEQ ID NO: 6213 - RNA, 19 nt, Artificial Sequence
  Description of Artificial Sequence: Synthetic oligonucleotide
uguugccaaaaccugaaca

SEQ ID NO: 6214 - RNA, 19 nt, Artificial Sequence
  Description of Artificial Sequence: Synthetic oligonucleotide
guguugccaaaaccugaac

SEQ ID NO: 6215 - RNA, 19 nt, Artificial Sequence
  Description of Artificial Sequence: Synthetic oligonucleotide
uguguugccaaaaccugaa

SEQ ID NO: 6216 - RNA, 19 nt, Artificial Sequence
  Description of Artificial Sequence: Synthetic oligonucleotide
auguguugccaaaaccuga

SEQ ID NO: 6217 - RNA, 19 nt, Artificial Sequence
  Description of Artificial Sequence: Synthetic oligonucleotide
uauguguugccaaaaccug

SEQ ID NO: 6218 - RNA, 19 nt, Artificial Sequence
  Description of Artificial Sequence: Synthetic oligonucleotide
cuauguguugccaaaaccu

SEQ ID NO: 6219 - RNA, 19 nt, Artificial Sequence
  Description of Artificial Sequence: Synthetic oligonucleotide
ucuauguguugccaaaacc

SEQ ID NO: 6220 - RNA, 19 nt, Artificial Sequence
  Description of Artificial Sequence: Synthetic oligonucleotide
aucuauguguugccaaaac

SEQ ID NO: 6221 - RNA, 19 nt, Artificial Sequence
  Description of Artificial Sequence: Synthetic oligonucleotide
gaucuauguguugccaaaa

SEQ ID NO: 6222 - RNA, 19 nt, Artificial Sequence
  Description of Artificial Sequence: Synthetic oligonucleotide
ugaucuauguguugccaaa

SEQ ID NO: 6223 - RNA, 19 nt, Artificial Sequence
  Description of Artificial Sequence: Synthetic oligonucleotide
augaucuauguguugccaa

SEQ ID NO: 6224 - RNA, 19 nt, Artificial Sequence
  Description of Artificial Sequence: Synthetic oligonucleotide
uaugaucuauguguugcca

SEQ ID NO: 6225 - RNA, 19 nt, Artificial Sequence
  Description of Artificial Sequence: Synthetic oligonucleotide
auaugaucuauguguugcc

SEQ ID NO: 6226 - RNA, 19 nt, Artificial Sequence
  Description of Artificial Sequence: Synthetic oligonucleotide
cauaugaucuauguguugc

SEQ ID NO: 6227 - RNA, 19 nt, Artificial Sequence
  Description of Artificial Sequence: Synthetic oligonucleotide
acauaugaucuauguguug

SEQ ID NO: 6228 - RNA, 19 nt, Artificial Sequence
  Description of Artificial Sequence: Synthetic oligonucleotide
gacauaugaucuauguguu

SEQ ID NO: 6229 - RNA, 19 nt, Artificial Sequence
  Description of Artificial Sequence: Synthetic oligonucleotide
agacauaugaucuaugugu

SEQ ID NO: 6230 - RNA, 19 nt, Artificial Sequence
  Description of Artificial Sequence: Synthetic oligonucleotide
cagacauaugaucuaugug

SEQ ID NO: 6231 - RNA, 19 nt, Artificial Sequence
  Description of Artificial Sequence: Synthetic oligonucleotide
ucagacauaugaucuaugu

SEQ ID NO: 6232 - RNA, 19 nt, Artificial Sequence
  Description of Artificial Sequence: Synthetic oligonucleotide
cucagacauaugaucuaug

SEQ ID NO: 6233 - RNA, 19 nt, Artificial Sequence
  Description of Artificial Sequence: Synthetic oligonucleotide
ccucagacauaugaucuau

SEQ ID NO: 6234 - RNA, 19 nt, Artificial Sequence
  Description of Artificial Sequence: Synthetic oligonucleotide
gccucagacauaugaucua

SEQ ID NO: 6235 - RNA, 19 nt, Artificial Sequence
  Description of Artificial Sequence: Synthetic oligonucleotide
ugccucagacauaugaucu

SEQ ID NO: 6236 - RNA, 19 nt, Artificial Sequence
  Description of Artificial Sequence: Synthetic oligonucleotide
gugccucagacauaugauc

SEQ ID NO: 6237 - RNA, 19 nt, Artificial Sequence
  Description of Artificial Sequence: Synthetic oligonucleotide
ugugccucagacauaugau

SEQ ID NO: 6238 - RNA, 19 nt, Artificial Sequence
  Description of Artificial Sequence: Synthetic oligonucleotide
uugugccucagacauauga

SEQ ID NO: 6239 - RNA, 19 nt, Artificial Sequence
  Description of Artificial Sequence: Synthetic oligonucleotide
cuugugccucagacauaug

SEQ ID NO: 6240 - RNA, 19 nt, Artificial Sequence
  Description of Artificial Sequence: Synthetic oligonucleotide
acuugugccucagacauau

SEQ ID NO: 6241 - RNA, 19 nt, Artificial Sequence
  Description of Artificial Sequence: Synthetic oligonucleotide
aacuugugccucagacaua

SEQ ID NO: 6242 - RNA, 19 nt, Artificial Sequence
  Description of Artificial Sequence: Synthetic oligonucleotide
caacuugugccucagacau

SEQ ID NO: 6243 - RNA, 19 nt, Artificial Sequence
  Description of Artificial Sequence: Synthetic oligonucleotide
ccaacuugugccucagaca

SEQ ID NO: 6244 - RNA, 19 nt, Artificial Sequence
  Description of Artificial Sequence: Synthetic oligonucleotide
gccaacuugugccucagac

SEQ ID NO: 6245 - RNA, 19 nt, Artificial Sequence
  Description of Artificial Sequence: Synthetic oligonucleotide
agccaacuugugccucaga

SEQ ID NO: 6246 - RNA, 19 nt, Artificial Sequence
  Description of Artificial Sequence: Synthetic oligonucleotide
cagccaacuugugccucag

SEQ ID NO: 6247 - RNA, 19 nt, Artificial Sequence
  Description of Artificial Sequence: Synthetic oligonucleotide
acagccaacuugugccuca

SEQ ID NO: 6248 - RNA, 19 nt, Artificial Sequence
  Description of Artificial Sequence: Synthetic oligonucleotide
aacagccaacuugugccuc

SEQ ID NO: 6249 - RNA, 19 nt, Artificial Sequence
  Description of Artificial Sequence: Synthetic oligonucleotide
gaacagccaacuugugccu

SEQ ID NO: 6250 - RNA, 19 nt, Artificial Sequence
  Description of Artificial Sequence: Synthetic oligonucleotide
ugaacagccaacuugugcc

SEQ ID NO: 6251 - RNA, 19 nt, Artificial Sequence
  Description of Artificial Sequence: Synthetic oligonucleotide
augaacagccaacuugugc

SEQ ID NO: 6252 - RNA, 19 nt, Artificial Sequence
  Description of Artificial Sequence: Synthetic oligonucleotide
gaugaacagccaacuugug

SEQ ID NO: 6253 - RNA, 19 nt, Artificial Sequence
  Description of Artificial Sequence: Synthetic oligonucleotide
agaugaacagccaacuugu

SEQ ID NO: 6254 - RNA, 19 nt, Artificial Sequence
  Description of Artificial Sequence: Synthetic oligonucleotide
aagaugaacagccaacuug

SEQ ID NO: 6255 - RNA, 19 nt, Artificial Sequence
  Description of Artificial Sequence: Synthetic oligonucleotide
aaagaugaacagccaacuu

SEQ ID NO: 6256 - RNA, 19 nt, Artificial Sequence
  Description of Artificial Sequence: Synthetic oligonucleotide
caaagaugaacagccaacu

SEQ ID NO: 6257 - RNA, 19 nt, Artificial Sequence
  Description of Artificial Sequence: Synthetic oligonucleotide
ucaaagaugaacagccaac

SEQ ID NO: 6258 - RNA, 19 nt, Artificial Sequence
  Description of Artificial Sequence: Synthetic oligonucleotide
uucaaagaugaacagccaa

SEQ ID NO: 6259 - RNA, 19 nt, Artificial Sequence
  Description of Artificial Sequence: Synthetic oligonucleotide
uuucaaagaugaacagcca

SEQ ID NO: 6260 - RNA, 19 nt, Artificial Sequence
  Description of Artificial Sequence: Synthetic oligonucleotide
guuucaaagaugaacagcc

SEQ ID NO: 6261 - RNA, 19 nt, Artificial Sequence
  Description of Artificial Sequence: Synthetic oligonucleotide
gguuucaaagaugaacagc

SEQ ID NO: 6262 - RNA, 19 nt, Artificial Sequence
  Description of Artificial Sequence: Synthetic oligonucleotide
ugguuucaaagaugaacag

SEQ ID NO: 6263 - RNA, 19 nt, Artificial Sequence
  Description of Artificial Sequence: Synthetic oligonucleotide
cugguuucaaagaugaaca

SEQ ID NO: 6264 - RNA, 19 nt, Artificial Sequence
  Description of Artificial Sequence: Synthetic oligonucleotide
ccugguuucaaagaugaac

SEQ ID NO: 6265 - RNA, 19 nt, Artificial Sequence
  Description of Artificial Sequence: Synthetic oligonucleotide
cccugguuucaaagaugaa

SEQ ID NO: 6266 - RNA, 19 nt, Artificial Sequence
  Description of Artificial Sequence: Synthetic oligonucleotide
ccccugguuucaaagauga

SEQ ID NO: 6267 - RNA, 19 nt, Artificial Sequence
  Description of Artificial Sequence: Synthetic oligonucleotide
uccccugguuucaaagaug

SEQ ID NO: 6268 - RNA, 19 nt, Artificial Sequence
  Description of Artificial Sequence: Synthetic oligonucleotide
auccccugguuucaaagau

SEQ ID NO: 6269 - RNA, 19 nt, Artificial Sequence
  Description of Artificial Sequence: Synthetic oligonucleotide
cauccccugguuucaaaga

SEQ ID NO: 6270 - RNA, 19 nt, Artificial Sequence
  Description of Artificial Sequence: Synthetic oligonucleotide
gcauccccugguuucaaag

SEQ ID NO: 6271 - RNA, 19 nt, Artificial Sequence
  Description of Artificial Sequence: Synthetic oligonucleotide
ugcauccccugguuucaaa

SEQ ID NO: 6272 - RNA, 19 nt, Artificial Sequence
  Description of Artificial Sequence: Synthetic oligonucleotide
gugcauccccugguuucaa

SEQ ID NO: 6273 - RNA, 19 nt, Artificial Sequence
  Description of Artificial Sequence: Synthetic oligonucleotide
ugugcauccccugguuuca

SEQ ID NO: 6274 - RNA, 19 nt, Artificial Sequence
  Description of Artificial Sequence: Synthetic oligonucleotide
cugugcauccccugguuuc

SEQ ID NO: 6275 - RNA, 19 nt, Artificial Sequence
  Description of Artificial Sequence: Synthetic oligonucleotide
acugugcauccccugguuu

SEQ ID NO: 6276 - RNA, 19 nt, Artificial Sequence
  Description of Artificial Sequence: Synthetic oligonucleotide
gacugugcauccccugguu

SEQ ID NO: 6277 - RNA, 19 nt, Artificial Sequence
  Description of Artificial Sequence: Synthetic oligonucleotide
agacugugcauccccuggu

SEQ ID NO: 6278 - RNA, 19 nt, Artificial Sequence
  Description of Artificial Sequence: Synthetic oligonucleotide
uagacugugcauccccugg

SEQ ID NO: 6279 - RNA, 19 nt, Artificial Sequence
  Description of Artificial Sequence: Synthetic oligonucleotide
uuagacugugcauccccug

SEQ ID NO: 6280 - RNA, 19 nt, Artificial Sequence
  Description of Artificial Sequence: Synthetic oligonucleotide
uuuagacugugcauccccu

SEQ ID NO: 6281 - RNA, 19 nt, Artificial Sequence
  Description of Artificial Sequence: Synthetic oligonucleotide
auuuagacugugcaucccc

SEQ ID NO: 6282 - RNA, 19 nt, Artificial Sequence
  Description of Artificial Sequence: Synthetic oligonucleotide
cauuuagacugugcauccc

SEQ ID NO: 6283 - RNA, 19 nt, Artificial Sequence
  Description of Artificial Sequence: Synthetic oligonucleotide
ucauuuagacugugcaucc

SEQ ID NO: 6284 - RNA, 19 nt, Artificial Sequence
  Description of Artificial Sequence: Synthetic oligonucleotide
uucauuuagacugugcauc

SEQ ID NO: 6285 - RNA, 19 nt, Artificial Sequence
  Description of Artificial Sequence: Synthetic oligonucleotide
auucauuuagacugugcau

SEQ ID NO: 6286 - RNA, 19 nt, Artificial Sequence
  Description of Artificial Sequence: Synthetic oligonucleotide
uauucauuuagacugugca

SEQ ID NO: 6287 - RNA, 19 nt, Artificial Sequence
  Description of Artificial Sequence: Synthetic oligonucleotide
auauucauuuagacugugc

SEQ ID NO: 6288 - RNA, 19 nt, Artificial Sequence
  Description of Artificial Sequence: Synthetic oligonucleotide
gauauucauuuagacugug

SEQ ID NO: 6289 - RNA, 19 nt, Artificial Sequence
  Description of Artificial Sequence: Synthetic oligonucleotide
agauauucauuuagacugu

SEQ ID NO: 6290 - RNA, 19 nt, Artificial Sequence
  Description of Artificial Sequence: Synthetic oligonucleotide
cagauauucauuuagacug

SEQ ID NO: 6291 - RNA, 19 nt, Artificial Sequence
  Description of Artificial Sequence: Synthetic oligonucleotide
gcagauauucauuuagacu

SEQ ID NO: 6292 - RNA, 19 nt, Artificial Sequence
  Description of Artificial Sequence: Synthetic oligonucleotide
ugcagauauucauuuagac

SEQ ID NO: 6293 - RNA, 19 nt, Artificial Sequence
  Description of Artificial Sequence: Synthetic oligonucleotide
augcagauauucauuuaga

SEQ ID NO: 6294 - RNA, 19 nt, Artificial Sequence
  Description of Artificial Sequence: Synthetic oligonucleotide
caugcagauauucauuuag

SEQ ID NO: 6295 - RNA, 19 nt, Artificial Sequence
  Description of Artificial Sequence: Synthetic oligonucleotide
ccaugcagauauucauuua

SEQ ID NO: 6296 - RNA, 19 nt, Artificial Sequence
  Description of Artificial Sequence: Synthetic oligonucleotide
cccaugcagauauucauuu

SEQ ID NO: 6297 - RNA, 19 nt, Artificial Sequence
  Description of Artificial Sequence: Synthetic oligonucleotide
ucccaugcagauauucauu

SEQ ID NO: 6298 - RNA, 19 nt, Artificial Sequence
  Description of Artificial Sequence: Synthetic oligonucleotide
aucccaugcagauauucau

SEQ ID NO: 6299 - RNA, 19 nt, Artificial Sequence
  Description of Artificial Sequence: Synthetic oligonucleotide
aaucccaugcagauauuca

SEQ ID NO: 6300 - RNA, 19 nt, Artificial Sequence
  Description of Artificial Sequence: Synthetic oligonucleotide
aaaucccaugcagauauuc

SEQ ID NO: 6301 - RNA, 19 nt, Artificial Sequence
  Description of Artificial Sequence: Synthetic oligonucleotide
caaaucccaugcagauauu

SEQ ID NO: 6302 - RNA, 19 nt, Artificial Sequence
  Description of Artificial Sequence: Synthetic oligonucleotide
gcaaaucccaugcagauau

SEQ ID NO: 6303 - RNA, 19 nt, Artificial Sequence
  Description of Artificial Sequence: Synthetic oligonucleotide
agcaaaucccaugcagaua

SEQ ID NO: 6304 - RNA, 19 nt, Artificial Sequence
  Description of Artificial Sequence: Synthetic oligonucleotide
uagcaaaucccaugcagau

SEQ ID NO: 6305 - RNA, 19 nt, Artificial Sequence
  Description of Artificial Sequence: Synthetic oligonucleotide
auagcaaaucccaugcaga

SEQ ID NO: 6306 - RNA, 19 nt, Artificial Sequence
  Description of Artificial Sequence: Synthetic oligonucleotide
gauagcaaaucccaugcag

SEQ ID NO: 6307 - RNA, 19 nt, Artificial Sequence
  Description of Artificial Sequence: Synthetic oligonucleotide
ugauagcaaaucccaugca

SEQ ID NO: 6308 - RNA, 19 nt, Artificial Sequence
  Description of Artificial Sequence: Synthetic oligonucleotide
augauagcaaaucccaugc

SEQ ID NO: 6309 - RNA, 19 nt, Artificial Sequence
  Description of Artificial Sequence: Synthetic oligonucleotide
uaugauagcaaaucccaug

SEQ ID NO: 6310 - RNA, 19 nt, Artificial Sequence
  Description of Artificial Sequence: Synthetic oligonucleotide
uuaugauagcaaaucccau

SEQ ID NO: 6311 - RNA, 19 nt, Artificial Sequence
  Description of Artificial Sequence: Synthetic oligonucleotide
auuaugauagcaaauccca

SEQ ID NO: 6312 - RNA, 19 nt, Artificial Sequence
  Description of Artificial Sequence: Synthetic oligonucleotide
uauuaugauagcaaauccc

SEQ ID NO: 6313 - RNA, 19 nt, Artificial Sequence
  Description of Artificial Sequence: Synthetic oligonucleotide
auauuaugauagcaaaucc

SEQ ID NO: 6314 - RNA, 19 nt, Artificial Sequence
  Description of Artificial Sequence: Synthetic oligonucleotide
aauauuaugauagcaaauc

SEQ ID NO: 6315 - RNA, 19 nt, Artificial Sequence
  Description of Artificial Sequence: Synthetic oligonucleotide
aaauauuaugauagcaaau

SEQ ID NO: 6316 - RNA, 19 nt, Artificial Sequence
  Description of Artificial Sequence: Synthetic oligonucleotide
uaaauauuaugauagcaaa

SEQ ID NO: 6317 - RNA, 19 nt, Artificial Sequence
  Description of Artificial Sequence: Synthetic oligonucleotide
guaaauauuaugauagcaa

SEQ ID NO: 6318 - RNA, 19 nt, Artificial Sequence
  Description of Artificial Sequence: Synthetic oligonucleotide
aguaaauauuaugauagca

SEQ ID NO: 6319 - RNA, 19 nt, Artificial Sequence
  Description of Artificial Sequence: Synthetic oligonucleotide
uaguaaauauuaugauagc

SEQ ID NO: 6320 - RNA, 19 nt, Artificial Sequence
  Description of Artificial Sequence: Synthetic oligonucleotide
auaguaaauauuaugauag

SEQ ID NO: 6321 - RNA, 19 nt, Artificial Sequence
  Description of Artificial Sequence: Synthetic oligonucleotide
cauaguaaauauuaugaua

SEQ ID NO: 6322 - RNA, 19 nt, Artificial Sequence
  Description of Artificial Sequence: Synthetic oligonucleotide
gcauaguaaauauuaugau

SEQ ID NO: 6323 - RNA, 19 nt, Artificial Sequence
  Description of Artificial Sequence: Synthetic oligonucleotide
ugcauaguaaauauuauga

SEQ ID NO: 6324 - RNA, 19 nt, Artificial Sequence
  Description of Artificial Sequence: Synthetic oligonucleotide
cugcauaguaaauauuaug

SEQ ID NO: 6325 - RNA, 19 nt, Artificial Sequence
  Description of Artificial Sequence: Synthetic oligonucleotide
ucugcauaguaaauauuau

SEQ ID NO: 6326 - RNA, 19 nt, Artificial Sequence
  Description of Artificial Sequence: Synthetic oligonucleotide
aucugcauaguaaauauua

SEQ ID NO: 6327 - RNA, 19 nt, Artificial Sequence
  Description of Artificial Sequence: Synthetic oligonucleotide
caucugcauaguaaauauu

SEQ ID NO: 6328 - RNA, 19 nt, Artificial Sequence
  Description of Artificial Sequence: Synthetic oligonucleotide
ucaucugcauaguaaauau

SEQ ID NO: 6329 - RNA, 19 nt, Artificial Sequence
  Description of Artificial Sequence: Synthetic oligonucleotide
uucaucugcauaguaaaua

SEQ ID NO: 6330 - RNA, 19 nt, Artificial Sequence
  Description of Artificial Sequence: Synthetic oligonucleotide
auucaucugcauaguaaau

SEQ ID NO: 6331 - RNA, 19 nt, Artificial Sequence
  Description of Artificial Sequence: Synthetic oligonucleotide
aauucaucugcauaguaaa

SEQ ID NO: 6332 - RNA, 19 nt, Artificial Sequence
  Description of Artificial Sequence: Synthetic oligonucleotide
gaauucaucugcauaguaa

SEQ ID NO: 6333 - RNA, 19 nt, Artificial Sequence
  Description of Artificial Sequence: Synthetic oligonucleotide
ugaauucaucugcauagua

SEQ ID NO: 6334 - RNA, 19 nt, Artificial Sequence
  Description of Artificial Sequence: Synthetic oligonucleotide
cugaauucaucugcauagu

SEQ ID NO: 6335 - RNA, 19 nt, Artificial Sequence
  Description of Artificial Sequence: Synthetic oligonucleotide
acugaauucaucugcauag

SEQ ID NO: 6336 - RNA, 19 nt, Artificial Sequence
  Description of Artificial Sequence: Synthetic oligonucleotide
cacugaauucaucugcaua

SEQ ID NO: 6337 - RNA, 19 nt, Artificial Sequence
  Description of Artificial Sequence: Synthetic oligonucleotide
acacugaauucaucugcau

SEQ ID NO: 6338 - RNA, 19 nt, Artificial Sequence
  Description of Artificial Sequence: Synthetic oligonucleotide
cacacugaauucaucugca

SEQ ID NO: 6339 - RNA, 19 nt, Artificial Sequence
  Description of Artificial Sequence: Synthetic oligonucleotide
ucacacugaauucaucugc

SEQ ID NO: 6340 - RNA, 19 nt, Artificial Sequence
  Description of Artificial Sequence: Synthetic oligonucleotide
cucacacugaauucaucug

SEQ ID NO: 6341 - RNA, 19 nt, Artificial Sequence
  Description of Artificial Sequence: Synthetic oligonucleotide
ccucacacugaauucaucu

SEQ ID NO: 6342 - RNA, 19 nt, Artificial Sequence
  Description of Artificial Sequence: Synthetic oligonucleotide
accucacacugaauucauc

SEQ ID NO: 6343 - RNA, 19 nt, Artificial Sequence
  Description of Artificial Sequence: Synthetic oligonucleotide
gaccucacacugaauucau

SEQ ID NO: 6344 - RNA, 19 nt, Artificial Sequence
  Description of Artificial Sequence: Synthetic oligonucleotide
ggaccucacacugaauuca

SEQ ID NO: 6345 - RNA, 19 nt, Artificial Sequence
  Description of Artificial Sequence: Synthetic oligonucleotide
aggaccucacacugaauuc

SEQ ID NO: 6346 - RNA, 19 nt, Artificial Sequence
  Description of Artificial Sequence: Synthetic oligonucleotide
caggaccucacacugaauu

SEQ ID NO: 6347 - RNA, 19 nt, Artificial Sequence
  Description of Artificial Sequence: Synthetic oligonucleotide
acaggaccucacacugaau

SEQ ID NO: 6348 - RNA, 19 nt, Artificial Sequence
  Description of Artificial Sequence: Synthetic oligonucleotide
cacaggaccucacacugaa

SEQ ID NO: 6349 - RNA, 19 nt, Artificial Sequence
  Description of Artificial Sequence: Synthetic oligonucleotide
acacaggaccucacacuga

SEQ ID NO: 6350 - RNA, 19 nt, Artificial Sequence
  Description of Artificial Sequence: Synthetic oligonucleotide
gacacaggaccucacacug

SEQ ID NO: 6351 - RNA, 19 nt, Artificial Sequence
  Description of Artificial Sequence: Synthetic oligonucleotide
ggacacaggaccucacacu

SEQ ID NO: 6352 - RNA, 19 nt, Artificial Sequence
  Description of Artificial Sequence: Synthetic oligonucleotide
cggacacaggaccucacac

SEQ ID NO: 6353 - RNA, 19 nt, Artificial Sequence
  Description of Artificial Sequence: Synthetic oligonucleotide
acggacacaggaccucaca

SEQ ID NO: 6354 - RNA, 19 nt, Artificial Sequence
  Description of Artificial Sequence: Synthetic oligonucleotide
uacggacacaggaccucac

SEQ ID NO: 6355 - RNA, 19 nt, Artificial Sequence
  Description of Artificial Sequence: Synthetic oligonucleotide
guacggacacaggaccuca

SEQ ID NO: 6356 - RNA, 19 nt, Artificial Sequence
  Description of Artificial Sequence: Synthetic oligonucleotide
aguacggacacaggaccuc

SEQ ID NO: 6357 - RNA, 19 nt, Artificial Sequence
  Description of Artificial Sequence: Synthetic oligonucleotide
uaguacggacacaggaccu

SEQ ID NO: 6358 - RNA, 19 nt, Artificial Sequence
  Description of Artificial Sequence: Synthetic oligonucleotide
auaguacggacacaggacc

SEQ ID NO: 6359 - RNA, 19 nt, Artificial Sequence
  Description of Artificial Sequence: Synthetic oligonucleotide
gauaguacggacacaggac

SEQ ID NO: 6360 - RNA, 19 nt, Artificial Sequence
  Description of Artificial Sequence: Synthetic oligonucleotide
ggauaguacggacacagga

SEQ ID NO: 6361 - RNA, 19 nt, Artificial Sequence
  Description of Artificial Sequence: Synthetic oligonucleotide
aggauaguacggacacagg

SEQ ID NO: 6362 - RNA, 19 nt, Artificial Sequence
  Description of Artificial Sequence: Synthetic oligonucleotide
gaggauaguacggacacag

SEQ ID NO: 6363 - RNA, 19 nt, Artificial Sequence
  Description of Artificial Sequence: Synthetic oligonucleotide
ugaggauaguacggacaca

SEQ ID NO: 6364 - RNA, 19 nt, Artificial Sequence
  Description of Artificial Sequence: Synthetic oligonucleotide
uugaggauaguacggacac

SEQ ID NO: 6365 - RNA, 19 nt, Artificial Sequence
  Description of Artificial Sequence: Synthetic oligonucleotide
uuugaggauaguacggaca

SEQ ID NO: 6366 - RNA, 19 nt, Artificial Sequence
  Description of Artificial Sequence: Synthetic oligonucleotide
auuugaggauaguacggac

SEQ ID NO: 6367 - RNA, 19 nt, Artificial Sequence
  Description of Artificial Sequence: Synthetic oligonucleotide
aauuugaggauaguacgga

SEQ ID NO: 6368 - RNA, 19 nt, Artificial Sequence
  Description of Artificial Sequence: Synthetic oligonucleotide
uaauuugaggauaguacgg

SEQ ID NO: 6369 - RNA, 19 nt, Artificial Sequence
  Description of Artificial Sequence: Synthetic oligonucleotide
auaauuugaggauaguacg

SEQ ID NO: 6370 - RNA, 19 nt, Artificial Sequence
  Description of Artificial Sequence: Synthetic oligonucleotide
aauaauuugaggauaguac

SEQ ID NO: 6371 - RNA, 19 nt, Artificial Sequence
  Description of Artificial Sequence: Synthetic oligonucleotide
aaauaauuugaggauagua

SEQ ID NO: 6372 - RNA, 19 nt, Artificial Sequence
  Description of Artificial Sequence: Synthetic oligonucleotide
uaaauaauuugaggauagu

SEQ ID NO: 6373 - RNA, 19 nt, Artificial Sequence
  Description of Artificial Sequence: Synthetic oligonucleotide
auaaauaauuugaggauag

SEQ ID NO: 6374 - RNA, 19 nt, Artificial Sequence
  Description of Artificial Sequence: Synthetic oligonucleotide
aauaaauaauuugaggaua

SEQ ID NO: 6375 - RNA, 19 nt, Artificial Sequence
  Description of Artificial Sequence: Synthetic oligonucleotide
aaauaaauaauuugaggau

SEQ ID NO: 6376 - RNA, 19 nt, Artificial Sequence
  Description of Artificial Sequence: Synthetic oligonucleotide
aaaauaaauaauuugagga

SEQ ID NO: 6377 - RNA, 19 nt, Artificial Sequence
  Description of Artificial Sequence: Synthetic oligonucleotide
uaaaauaaauaauuugagg

SEQ ID NO: 6378 - RNA, 19 nt, Artificial Sequence
  Description of Artificial Sequence: Synthetic oligonucleotide
auaaaauaaauaauuugag

SEQ ID NO: 6379 - RNA, 19 nt, Artificial Sequence
  Description of Artificial Sequence: Synthetic oligonucleotide
uauaaaauaaauaauuuga

SEQ ID NO: 6380 - RNA, 19 nt, Artificial Sequence
  Description of Artificial Sequence: Synthetic oligonucleotide
cuauaaaauaaauaauuug

SEQ ID NO: 6381 - RNA, 19 nt, Artificial Sequence
  Description of Artificial Sequence: Synthetic oligonucleotide
acuauaaaauaaauaauuu

SEQ ID NO: 6382 - RNA, 19 nt, Artificial Sequence
  Description of Artificial Sequence: Synthetic oligonucleotide
cacuauaaaauaaauaauu

SEQ ID NO: 6383 - RNA, 19 nt, Artificial Sequence
  Description of Artificial Sequence: Synthetic oligonucleotide
gcacuauaaaauaaauaau

SEQ ID NO: 6384 - RNA, 19 nt, Artificial Sequence
  Description of Artificial Sequence: Synthetic oligonucleotide
agcacuauaaaauaaauaa

SEQ ID NO: 6385 - RNA, 19 nt, Artificial Sequence
  Description of Artificial Sequence: Synthetic oligonucleotide
cagcacuauaaaauaaaua

SEQ ID NO: 6386 - RNA, 19 nt, Artificial Sequence
  Description of Artificial Sequence: Synthetic oligonucleotide
ucagcacuauaaaauaaau

SEQ ID NO: 6387 - RNA, 19 nt, Artificial Sequence
  Description of Artificial Sequence: Synthetic oligonucleotide
cucagcacuauaaaauaaa

SEQ ID NO: 6388 - RNA, 19 nt, Artificial Sequence
  Description of Artificial Sequence: Synthetic oligonucleotide
ucucagcacuauaaaauaa

SEQ ID NO: 6389 - RNA, 19 nt, Artificial Sequence
  Description of Artificial Sequence: Synthetic oligonucleotide
aucucagcacuauaaaaua

SEQ ID NO: 6390 - RNA, 19 nt, Artificial Sequence
  Description of Artificial Sequence: Synthetic oligonucleotide
gaucucagcacuauaaaau

SEQ ID NO: 6391 - RNA, 19 nt, Artificial Sequence
  Description of Artificial Sequence: Synthetic oligonucleotide
ggaucucagcacuauaaaa

SEQ ID NO: 6392 - RNA, 19 nt, Artificial Sequence
  Description of Artificial Sequence: Synthetic oligonucleotide
aggaucucagcacuauaaa

SEQ ID NO: 6393 - RNA, 19 nt, Artificial Sequence
  Description of Artificial Sequence: Synthetic oligonucleotide
gaggaucucagcacuauaa

SEQ ID NO: 6394 - RNA, 19 nt, Artificial Sequence
  Description of Artificial Sequence: Synthetic oligonucleotide
ugaggaucucagcacuaua

SEQ ID NO: 6395 - RNA, 19 nt, Artificial Sequence
  Description of Artificial Sequence: Synthetic oligonucleotide
uugaggaucucagcacuau

SEQ ID NO: 6396 - RNA, 19 nt, Artificial Sequence
  Description of Artificial Sequence: Synthetic oligonucleotide
uuugaggaucucagcacua

SEQ ID NO: 6397 - RNA, 19 nt, Artificial Sequence
  Description of Artificial Sequence: Synthetic oligonucleotide
auuugaggaucucagcacu

SEQ ID NO: 6398 - RNA, 19 nt, Artificial Sequence
  Description of Artificial Sequence: Synthetic oligonucleotide
uauuugaggaucucagcac

SEQ ID NO: 6399 - RNA, 19 nt, Artificial Sequence
  Description of Artificial Sequence: Synthetic oligonucleotide
uuauuugaggaucucagca

SEQ ID NO: 6400 - RNA, 19 nt, Artificial Sequence
  Description of Artificial Sequence: Synthetic oligonucleotide
auuauuugaggaucucagc

SEQ ID NO: 6401 - RNA, 19 nt, Artificial Sequence
  Description of Artificial Sequence: Synthetic oligonucleotide
gauuauuugaggaucucag

SEQ ID NO: 6402 - RNA, 19 nt, Artificial Sequence
  Description of Artificial Sequence: Synthetic oligonucleotide
agauuauuugaggaucuca

SEQ ID NO: 6403 - RNA, 19 nt, Artificial Sequence
  Description of Artificial Sequence: Synthetic oligonucleotide
gagauuauuugaggaucuc

SEQ ID NO: 6404 - RNA, 19 nt, Artificial Sequence
  Description of Artificial Sequence: Synthetic oligonucleotide
ugagauuauuugaggaucu

SEQ ID NO: 6405 - RNA, 19 nt, Artificial Sequence
  Description of Artificial Sequence: Synthetic oligonucleotide
uugagauuauuugaggauc

SEQ ID NO: 6406 - RNA, 19 nt, Artificial Sequence
  Description of Artificial Sequence: Synthetic oligonucleotide
auugagauuauuugaggau

SEQ ID NO: 6407 - RNA, 19 nt, Artificial Sequence
  Description of Artificial Sequence: Synthetic oligonucleotide
aauugagauuauuugagga

SEQ ID NO: 6408 - RNA, 19 nt, Artificial Sequence
  Description of Artificial Sequence: Synthetic oligonucleotide
aaauugagauuauuugagg

SEQ ID NO: 6409 - RNA, 19 nt, Artificial Sequence
  Description of Artificial Sequence: Synthetic oligonucleotide
gaaauugagauuauuugag

SEQ ID NO: 6410 - RNA, 19 nt, Artificial Sequence
  Description of Artificial Sequence: Synthetic oligonucleotide
ugaaauugagauuauuuga

SEQ ID NO: 6411 - RNA, 19 nt, Artificial Sequence
  Description of Artificial Sequence: Synthetic oligonucleotide
cugaaauugagauuauuug

SEQ ID NO: 6412 - RNA, 19 nt, Artificial Sequence
  Description of Artificial Sequence: Synthetic oligonucleotide
ccugaaauugagauuauuu

SEQ ID NO: 6413 - RNA, 19 nt, Artificial Sequence
  Description of Artificial Sequence: Synthetic oligonucleotide
uccugaaauugagauuauu

SEQ ID NO: 6414 - RNA, 19 nt, Artificial Sequence
  Description of Artificial Sequence: Synthetic oligonucleotide
cuccugaaauugagauuau

SEQ ID NO: 6415 - RNA, 19 nt, Artificial Sequence
  Description of Artificial Sequence: Synthetic oligonucleotide
ccuccugaaauugagauua

SEQ ID NO: 6416 - RNA, 19 nt, Artificial Sequence
  Description of Artificial Sequence: Synthetic oligonucleotide
accuccugaaauugagauu

SEQ ID NO: 6417 - RNA, 19 nt, Artificial Sequence
  Description of Artificial Sequence: Synthetic oligonucleotide
aaccuccugaaauugagau

SEQ ID NO: 6418 - RNA, 19 nt, Artificial Sequence
  Description of Artificial Sequence: Synthetic oligonucleotide
aaaccuccugaaauugaga

SEQ ID NO: 6419 - RNA, 19 nt, Artificial Sequence
  Description of Artificial Sequence: Synthetic oligonucleotide
gaaaccuccugaaauugag

SEQ ID NO: 6420 - RNA, 19 nt, Artificial Sequence
  Description of Artificial Sequence: Synthetic oligonucleotide
ugaaaccuccugaaauuga

SEQ ID NO: 6421 - RNA, 19 nt, Artificial Sequence
  Description of Artificial Sequence: Synthetic oligonucleotide
gugaaaccuccugaaauug

SEQ ID NO: 6422 - RNA, 19 nt, Artificial Sequence
  Description of Artificial Sequence: Synthetic oligonucleotide
ugugaaaccuccugaaauu

SEQ ID NO: 6423 - RNA, 19 nt, Artificial Sequence
  Description of Artificial Sequence: Synthetic oligonucleotide
uugugaaaccuccugaaau

SEQ ID NO: 6424 - RNA, 19 nt, Artificial Sequence
  Description of Artificial Sequence: Synthetic oligonucleotide
uuugugaaaccuccugaaa

SEQ ID NO: 6425 - RNA, 19 nt, Artificial Sequence
  Description of Artificial Sequence: Synthetic oligonucleotide
uuuugugaaaccuccugaa

SEQ ID NO: 6426 - RNA, 19 nt, Artificial Sequence
  Description of Artificial Sequence: Synthetic oligonucleotide
auuuugugaaaccuccuga

SEQ ID NO: 6427 - RNA, 19 nt, Artificial Sequence
  Description of Artificial Sequence: Synthetic oligonucleotide
cauuuugugaaaccuccug

SEQ ID NO: 6428 - RNA, 19 nt, Artificial Sequence
  Description of Artificial Sequence: Synthetic oligonucleotide
ccauuuugugaaaccuccu

SEQ ID NO: 6429 - RNA, 19 nt, Artificial Sequence
  Description of Artificial Sequence: Synthetic oligonucleotide
uccauuuugugaaaccucc

SEQ ID NO: 6430 - RNA, 19 nt, Artificial Sequence
  Description of Artificial Sequence: Synthetic oligonucleotide
guccauuuugugaaaccuc

SEQ ID NO: 6431 - RNA, 19 nt, Artificial Sequence
  Description of Artificial Sequence: Synthetic oligonucleotide
aguccauuuugugaaaccu

SEQ ID NO: 6432 - RNA, 19 nt, Artificial Sequence
  Description of Artificial Sequence: Synthetic oligonucleotide
gaguccauuuugugaaacc

SEQ ID NO: 6433 - RNA, 19 nt, Artificial Sequence
  Description of Artificial Sequence: Synthetic oligonucleotide
ggaguccauuuugugaaac

SEQ ID NO: 6434 - RNA, 19 nt, Artificial Sequence
  Description of Artificial Sequence: Synthetic oligonucleotide
aggaguccauuuugugaaa

SEQ ID NO: 6435 - RNA, 19 nt, Artificial Sequence
  Description of Artificial Sequence: Synthetic oligonucleotide
caggaguccauuuugugaa

SEQ ID NO: 6436 - RNA, 19 nt, Artificial Sequence
  Description of Artificial Sequence: Synthetic oligonucleotide
ucaggaguccauuuuguga

SEQ ID NO: 6437 - RNA, 19 nt, Artificial Sequence
  Description of Artificial Sequence: Synthetic oligonucleotide
uucaggaguccauuuugug

SEQ ID NO: 6438 - RNA, 19 nt, Artificial Sequence
  Description of Artificial Sequence: Synthetic oligonucleotide
cuucaggaguccauuuugu

SEQ ID NO: 6439 - RNA, 19 nt, Artificial Sequence
  Description of Artificial Sequence: Synthetic oligonucleotide
acuucaggaguccauuuug

SEQ ID NO: 6440 - RNA, 19 nt, Artificial Sequence
  Description of Artificial Sequence: Synthetic oligonucleotide
uacuucaggaguccauuuu

SEQ ID NO: 6441 - RNA, 19 nt, Artificial Sequence
  Description of Artificial Sequence: Synthetic oligonucleotide
cuacuucaggaguccauuu

SEQ ID NO: 6442 - RNA, 19 nt, Artificial Sequence
  Description of Artificial Sequence: Synthetic oligonucleotide
ucuacuucaggaguccauu

SEQ ID NO: 6443 - RNA, 19 nt, Artificial Sequence
  Description of Artificial Sequence: Synthetic oligonucleotide
gucuacuucaggaguccau

SEQ ID NO: 6444 - RNA, 19 nt, Artificial Sequence
  Description of Artificial Sequence: Synthetic oligonucleotide
ugucuacuucaggagucca

SEQ ID NO: 6445 - RNA, 19 nt, Artificial Sequence
  Description of Artificial Sequence: Synthetic oligonucleotide
cugucuacuucaggagucc

SEQ ID NO: 6446 - RNA, 19 nt, Artificial Sequence
  Description of Artificial Sequence: Synthetic oligonucleotide
ucugucuacuucaggaguc

SEQ ID NO: 6447 - RNA, 19 nt, Artificial Sequence
  Description of Artificial Sequence: Synthetic oligonucleotide
cucugucuacuucaggagu

SEQ ID NO: 6448 - RNA, 19 nt, Artificial Sequence
  Description of Artificial Sequence: Synthetic oligonucleotide
acucugucuacuucaggag

SEQ ID NO: 6449 - RNA, 19 nt, Artificial Sequence
  Description of Artificial Sequence: Synthetic oligonucleotide
uacucugucuacuucagga

SEQ ID NO: 6450 - RNA, 19 nt, Artificial Sequence
  Description of Artificial Sequence: Synthetic oligonucleotide
cuacucugucuacuucagg

SEQ ID NO: 6451 - RNA, 19 nt, Artificial Sequence
  Description of Artificial Sequence: Synthetic oligonucleotide
acuacucugucuacuucag

SEQ ID NO: 6452 - RNA, 19 nt, Artificial Sequence
  Description of Artificial Sequence: Synthetic oligonucleotide
cacuacucugucuacuuca

SEQ ID NO: 6453 - RNA, 19 nt, Artificial Sequence
  Description of Artificial Sequence: Synthetic oligonucleotide
ucacuacucugucuacuuc

SEQ ID NO: 6454 - RNA, 19 nt, Artificial Sequence
  Description of Artificial Sequence: Synthetic oligonucleotide
cucacuacucugucuacuu

SEQ ID NO: 6455 - RNA, 19 nt, Artificial Sequence
  Description of Artificial Sequence: Synthetic oligonucleotide
ccucacuacucugucuacu

SEQ ID NO: 6456 - RNA, 19 nt, Artificial Sequence
  Description of Artificial Sequence: Synthetic oligonucleotide
accucacuacucugucuac

SEQ ID NO: 6457 - RNA, 19 nt, Artificial Sequence
  Description of Artificial Sequence: Synthetic oligonucleotide
aaccucacuacucugucua

SEQ ID NO: 6458 - RNA, 19 nt, Artificial Sequence
  Description of Artificial Sequence: Synthetic oligonucleotide
aaaccucacuacucugucu

SEQ ID NO: 6459 - RNA, 19 nt, Artificial Sequence
  Description of Artificial Sequence: Synthetic oligonucleotide
gaaaccucacuacucuguc

SEQ ID NO: 6460 - RNA, 19 nt, Artificial Sequence
  Description of Artificial Sequence: Synthetic oligonucleotide
ugaaaccucacuacucugu

SEQ ID NO: 6461 - RNA, 19 nt, Artificial Sequence
  Description of Artificial Sequence: Synthetic oligonucleotide
augaaaccucacuacucug

SEQ ID NO: 6462 - RNA, 19 nt, Artificial Sequence
  Description of Artificial Sequence: Synthetic oligonucleotide
aaugaaaccucacuacucu

SEQ ID NO: 6463 - RNA, 19 nt, Artificial Sequence
  Description of Artificial Sequence: Synthetic oligonucleotide
caaugaaaccucacuacuc

SEQ ID NO: 6464 - RNA, 19 nt, Artificial Sequence
  Description of Artificial Sequence: Synthetic oligonucleotide
gcaaugaaaccucacuacu

SEQ ID NO: 6465 - RNA, 19 nt, Artificial Sequence
  Description of Artificial Sequence: Synthetic oligonucleotide
ggcaaugaaaccucacuac

SEQ ID NO: 6466 - RNA, 19 nt, Artificial Sequence
  Description of Artificial Sequence: Synthetic oligonucleotide
gggcaaugaaaccucacua

SEQ ID NO: 6467 - RNA, 19 nt, Artificial Sequence
  Description of Artificial Sequence: Synthetic oligonucleotide
agggcaaugaaaccucacu

SEQ ID NO: 6468 - RNA, 19 nt, Artificial Sequence
  Description of Artificial Sequence: Synthetic oligonucleotide
gagggcaaugaaaccucac

SEQ ID NO: 6469 - RNA, 19 nt, Artificial Sequence
  Description of Artificial Sequence: Synthetic oligonucleotide
agagggcaaugaaaccuca

SEQ ID NO: 6470 - RNA, 19 nt, Artificial Sequence
  Description of Artificial Sequence: Synthetic oligonucleotide
uagagggcaaugaaaccuc

SEQ ID NO: 6471 - RNA, 19 nt, Artificial Sequence
  Description of Artificial Sequence: Synthetic oligonucleotide
auagagggcaaugaaaccu

SEQ ID NO: 6472 - RNA, 19 nt, Artificial Sequence
  Description of Artificial Sequence: Synthetic oligonucleotide
uauagagggcaaugaaacc

SEQ ID NO: 6473 - RNA, 19 nt, Artificial Sequence
  Description of Artificial Sequence: Synthetic oligonucleotide
uuauagagggcaaugaaac

SEQ ID NO: 6474 - RNA, 19 nt, Artificial Sequence
  Description of Artificial Sequence: Synthetic oligonucleotide
cuuauagagggcaaugaaa

SEQ ID NO: 6475 - RNA, 19 nt, Artificial Sequence
  Description of Artificial Sequence: Synthetic oligonucleotide
gcuuauagagggcaaugaa

SEQ ID NO: 6476 - RNA, 19 nt, Artificial Sequence
  Description of Artificial Sequence: Synthetic oligonucleotide
agcuuauagagggcaauga

SEQ ID NO: 6477 - RNA, 19 nt, Artificial Sequence
  Description of Artificial Sequence: Synthetic oligonucleotide
aagcuuauagagggcaaug

SEQ ID NO: 6478 - RNA, 19 nt, Artificial Sequence
  Description of Artificial Sequence: Synthetic oligonucleotide
gaagcuuauagagggcaau

SEQ ID NO: 6479 - RNA, 19 nt, Artificial Sequence
  Description of Artificial Sequence: Synthetic oligonucleotide
agaagcuuauagagggcaa

SEQ ID NO: 6480 - RNA, 19 nt, Artificial Sequence
  Description of Artificial Sequence: Synthetic oligonucleotide
cagaagcuuauagagggca

SEQ ID NO: 6481 - RNA, 19 nt, Artificial Sequence
  Description of Artificial Sequence: Synthetic oligonucleotide
ucagaagcuuauagagggc

SEQ ID NO: 6482 - RNA, 19 nt, Artificial Sequence
  Description of Artificial Sequence: Synthetic oligonucleotide
gucagaagcuuauagaggg

SEQ ID NO: 6483 - RNA, 19 nt, Artificial Sequence
  Description of Artificial Sequence: Synthetic oligonucleotide
agucagaagcuuauagagg

SEQ ID NO: 6484 - RNA, 19 nt, Artificial Sequence
  Description of Artificial Sequence: Synthetic oligonucleotide
uagucagaagcuuauagag

SEQ ID NO: 6485 - RNA, 19 nt, Artificial Sequence
  Description of Artificial Sequence: Synthetic oligonucleotide
cuagucagaagcuuauaga

SEQ ID NO: 6486 - RNA, 19 nt, Artificial Sequence
  Description of Artificial Sequence: Synthetic oligonucleotide
gcuagucagaagcuuauag

SEQ ID NO: 6487 - RNA, 19 nt, Artificial Sequence
  Description of Artificial Sequence: Synthetic oligonucleotide
ggcuagucagaagcuuaua

SEQ ID NO: 6488 - RNA, 19 nt, Artificial Sequence
  Description of Artificial Sequence: Synthetic oligonucleotide
uggcuagucagaagcuuau

SEQ ID NO: 6489 - RNA, 19 nt, Artificial Sequence
  Description of Artificial Sequence: Synthetic oligonucleotide
uuggcuagucagaagcuua

SEQ ID NO: 6490 - RNA, 19 nt, Artificial Sequence
  Description of Artificial Sequence: Synthetic oligonucleotide
auuggcuagucagaagcuu

SEQ ID NO: 6491 - RNA, 19 nt, Artificial Sequence
  Description of Artificial Sequence: Synthetic oligonucleotide
cauuggcuagucagaagcu

SEQ ID NO: 6492 - RNA, 19 nt, Artificial Sequence
  Description of Artificial Sequence: Synthetic oligonucleotide
ccauuggcuagucagaagc

SEQ ID NO: 6493 - RNA, 19 nt, Artificial Sequence
  Description of Artificial Sequence: Synthetic oligonucleotide
gccauuggcuagucagaag

SEQ ID NO: 6494 - RNA, 19 nt, Artificial Sequence
  Description of Artificial Sequence: Synthetic oligonucleotide
ugccauuggcuagucagaa

SEQ ID NO: 6495 - RNA, 19 nt, Artificial Sequence
  Description of Artificial Sequence: Synthetic oligonucleotide
augccauuggcuagucaga

SEQ ID NO: 6496 - RNA, 19 nt, Artificial Sequence
  Description of Artificial Sequence: Synthetic oligonucleotide
gaugccauuggcuagucag

SEQ ID NO: 6497 - RNA, 19 nt, Artificial Sequence
  Description of Artificial Sequence: Synthetic oligonucleotide
ugaugccauuggcuaguca

SEQ ID NO: 6498 - RNA, 19 nt, Artificial Sequence
  Description of Artificial Sequence: Synthetic oligonucleotide
augaugccauuggcuaguc

SEQ ID NO: 6499 - RNA, 19 nt, Artificial Sequence
  Description of Artificial Sequence: Synthetic oligonucleotide
gaugaugccauuggcuagu

SEQ ID NO: 6500 - RNA, 19 nt, Artificial Sequence
  Description of Artificial Sequence: Synthetic oligonucleotide
ggaugaugccauuggcuag

SEQ ID NO: 6501 - RNA, 19 nt, Artificial Sequence
  Description of Artificial Sequence: Synthetic oligonucleotide
uggaugaugccauuggcua

SEQ ID NO: 6502 - RNA, 19 nt, Artificial Sequence
  Description of Artificial Sequence: Synthetic oligonucleotide
uuggaugaugccauuggcu

SEQ ID NO: 6503 - RNA, 19 nt, Artificial Sequence
  Description of Artificial Sequence: Synthetic oligonucleotide
auuggaugaugccauuggc

SEQ ID NO: 6504 - RNA, 19 nt, Artificial Sequence
  Description of Artificial Sequence: Synthetic oligonucleotide
aauuggaugaugccauugg

SEQ ID NO: 6505 - RNA, 19 nt, Artificial Sequence
  Description of Artificial Sequence: Synthetic oligonucleotide
aaauuggaugaugccauug

SEQ ID NO: 6506 - RNA, 19 nt, Artificial Sequence
  Description of Artificial Sequence: Synthetic oligonucleotide
aaaauuggaugaugccauu

SEQ ID NO: 6507 - RNA, 19 nt, Artificial Sequence
  Description of Artificial Sequence: Synthetic oligonucleotide
gaaaauuggaugaugccau

SEQ ID NO: 6508 - RNA, 19 nt, Artificial Sequence
  Description of Artificial Sequence: Synthetic oligonucleotide
agaaaauuggaugaugcca

SEQ ID NO: 6509 - RNA, 19 nt, Artificial Sequence
  Description of Artificial Sequence: Synthetic oligonucleotide
aagaaaauuggaugaugcc

SEQ ID NO: 6510 - RNA, 19 nt, Artificial Sequence
  Description of Artificial Sequence: Synthetic oligonucleotide
gaagaaaauuggaugaugc

SEQ ID NO: 6511 - RNA, 19 nt, Artificial Sequence
  Description of Artificial Sequence: Synthetic oligonucleotide
ggaagaaaauuggaugaug

SEQ ID NO: 6512 - RNA, 19 nt, Artificial Sequence
  Description of Artificial Sequence: Synthetic oligonucleotide
gggaagaaaauuggaugau

SEQ ID NO: 6513 - RNA, 19 nt, Artificial Sequence
  Description of Artificial Sequence: Synthetic oligonucleotide
ugggaagaaaauuggauga

SEQ ID NO: 6514 - RNA, 19 nt, Artificial Sequence
  Description of Artificial Sequence: Synthetic oligonucleotide
uugggaagaaaauuggaug

SEQ ID NO: 6515 - RNA, 19 nt, Artificial Sequence
  Description of Artificial Sequence: Synthetic oligonucleotide
uuugggaagaaaauuggau

SEQ ID NO: 6516 - RNA, 19 nt, Artificial Sequence
  Description of Artificial Sequence: Synthetic oligonucleotide
guuugggaagaaaauugga

SEQ ID NO: 6517 - RNA, 19 nt, Artificial Sequence
  Description of Artificial Sequence: Synthetic oligonucleotide
gguuugggaagaaaauugg

SEQ ID NO: 6518 - RNA, 19 nt, Artificial Sequence
  Description of Artificial Sequence: Synthetic oligonucleotide
agguuugggaagaaaauug

SEQ ID NO: 6519 - RNA, 19 nt, Artificial Sequence
  Description of Artificial Sequence: Synthetic oligonucleotide
gagguuugggaagaaaauu

SEQ ID NO: 6520 - RNA, 19 nt, Artificial Sequence
  Description of Artificial Sequence: Synthetic oligonucleotide
agagguuugggaagaaaau

SEQ ID NO: 6521 - RNA, 19 nt, Artificial Sequence
  Description of Artificial Sequence: Synthetic oligonucleotide
cagagguuugggaagaaaa

SEQ ID NO: 6522 - RNA, 19 nt, Artificial Sequence
  Description of Artificial Sequence: Synthetic oligonucleotide
gcagagguuugggaagaaa

SEQ ID NO: 6523 - RNA, 19 nt, Artificial Sequence
  Description of Artificial Sequence: Synthetic oligonucleotide
ugcagagguuugggaagaa

SEQ ID NO: 6524 - RNA, 19 nt, Artificial Sequence
  Description of Artificial Sequence: Synthetic oligonucleotide
cugcagagguuugggaaga

SEQ ID NO: 6525 - RNA, 19 nt, Artificial Sequence
  Description of Artificial Sequence: Synthetic oligonucleotide
gcugcagagguuugggaag

SEQ ID NO: 6526 - RNA, 19 nt, Artificial Sequence
  Description of Artificial Sequence: Synthetic oligonucleotide
ugcugcagagguuugggaa

SEQ ID NO: 6527 - RNA, 19 nt, Artificial Sequence
  Description of Artificial Sequence: Synthetic oligonucleotide
augcugcagagguuuggga

SEQ ID NO: 6528 - RNA, 19 nt, Artificial Sequence
  Description of Artificial Sequence: Synthetic oligonucleotide
gaugcugcagagguuuggg

SEQ ID NO: 6529 - RNA, 19 nt, Artificial Sequence
  Description of Artificial Sequence: Synthetic oligonucleotide
agaugcugcagagguuugg

SEQ ID NO: 6530 - RNA, 19 nt, Artificial Sequence
  Description of Artificial Sequence: Synthetic oligonucleotide
cagaugcugcagagguuug

SEQ ID NO: 6531 - RNA, 19 nt, Artificial Sequence
  Description of Artificial Sequence: Synthetic oligonucleotide
gcagaugcugcagagguuu

SEQ ID NO: 6532 - RNA, 19 nt, Artificial Sequence
  Description of Artificial Sequence: Synthetic oligonucleotide
agcagaugcugcagagguu

SEQ ID NO: 6533 - RNA, 19 nt, Artificial Sequence
  Description of Artificial Sequence: Synthetic oligonucleotide
aagcagaugcugcagaggu

SEQ ID NO: 6534 - RNA, 19 nt, Artificial Sequence
  Description of Artificial Sequence: Synthetic oligonucleotide
aaagcagaugcugcagagg

SEQ ID NO: 6535 - RNA, 19 nt, Artificial Sequence
  Description of Artificial Sequence: Synthetic oligonucleotide
uaaagcagaugcugcagag

SEQ ID NO: 6536 - RNA, 19 nt, Artificial Sequence
  Description of Artificial Sequence: Synthetic oligonucleotide
auaaagcagaugcugcaga

SEQ ID NO: 6537 - RNA, 19 nt, Artificial Sequence
  Description of Artificial Sequence: Synthetic oligonucleotide
aauaaagcagaugcugcag

SEQ ID NO: 6538 - RNA, 19 nt, Artificial Sequence
  Description of Artificial Sequence: Synthetic oligonucleotide
caauaaagcagaugcugca

SEQ ID NO: 6539 - RNA, 19 nt, Artificial Sequence
  Description of Artificial Sequence: Synthetic oligonucleotide
gcaauaaagcagaugcugc

SEQ ID NO: 6540 - RNA, 19 nt, Artificial Sequence
  Description of Artificial Sequence: Synthetic oligonucleotide
ggcaauaaagcagaugcug

SEQ ID NO: 6541 - RNA, 19 nt, Artificial Sequence
  Description of Artificial Sequence: Synthetic oligonucleotide
uggcaauaaagcagaugcu

SEQ ID NO: 6542 - RNA, 19 nt, Artificial Sequence
  Description of Artificial Sequence: Synthetic oligonucleotide
uuggcaauaaagcagaugc

SEQ ID NO: 6543 - RNA, 19 nt, Artificial Sequence
  Description of Artificial Sequence: Synthetic oligonucleotide
uuuggcaauaaagcagaug

SEQ ID NO: 6544 - RNA, 19 nt, Artificial Sequence
  Description of Artificial Sequence: Synthetic oligonucleotide
cuuuggcaauaaagcagau

SEQ ID NO: 6545 - RNA, 19 nt, Artificial Sequence
  Description of Artificial Sequence: Synthetic oligonucleotide
ccuuuggcaauaaagcaga

SEQ ID NO: 6546 - RNA, 19 nt, Artificial Sequence
  Description of Artificial Sequence: Synthetic oligonucleotide
cccuuuggcaauaaagcag

SEQ ID NO: 6547 - RNA, 19 nt, Artificial Sequence
  Description of Artificial Sequence: Synthetic oligonucleotide
gcccuuuggcaauaaagca

SEQ ID NO: 6548 - RNA, 19 nt, Artificial Sequence
  Description of Artificial Sequence: Synthetic oligonucleotide
agcccuuuggcaauaaagc

SEQ ID NO: 6549 - RNA, 19 nt, Artificial Sequence
  Description of Artificial Sequence: Synthetic oligonucleotide
uagcccuuuggcaauaaag

SEQ ID NO: 6550 - RNA, 19 nt, Artificial Sequence
  Description of Artificial Sequence: Synthetic oligonucleotide
cuagcccuuuggcaauaaa

SEQ ID NO: 6551 - RNA, 19 nt, Artificial Sequence
  Description of Artificial Sequence: Synthetic oligonucleotide
acuagcccuuuggcaauaa

SEQ ID NO: 6552 - RNA, 19 nt, Artificial Sequence
  Description of Artificial Sequence: Synthetic oligonucleotide
aacuagcccuuuggcaaua

SEQ ID NO: 6553 - RNA, 19 nt, Artificial Sequence
  Description of Artificial Sequence: Synthetic oligonucleotide
aaacuagcccuuuggcaau

SEQ ID NO: 6554 - RNA, 19 nt, Artificial Sequence
  Description of Artificial Sequence: Synthetic oligonucleotide
gaaacuagcccuuuggcaa

SEQ ID NO: 6555 - RNA, 19 nt, Artificial Sequence
  Description of Artificial Sequence: Synthetic oligonucleotide
cgaaacuagcccuuuggca

SEQ ID NO: 6556 - RNA, 19 nt, Artificial Sequence
  Description of Artificial Sequence: Synthetic oligonucleotide
ccgaaacuagcccuuuggc

SEQ ID NO: 6557 - RNA, 19 nt, Artificial Sequence
  Description of Artificial Sequence: Synthetic oligonucleotide
accgaaacuagcccuuugg

SEQ ID NO: 6558 - RNA, 19 nt, Artificial Sequence
  Description of Artificial Sequence: Synthetic oligonucleotide
aaccgaaacuagcccuuug

SEQ ID NO: 6559 - RNA, 19 nt, Artificial Sequence
  Description of Artificial Sequence: Synthetic oligonucleotide
aaaccgaaacuagcccuuu

SEQ ID NO: 6560 - RNA, 19 nt, Artificial Sequence
  Description of Artificial Sequence: Synthetic oligonucleotide
aaaaccgaaacuagcccuu

SEQ ID NO: 6561 - RNA, 19 nt, Artificial Sequence
  Description of Artificial Sequence: Synthetic oligonucleotide
gaaaaccgaaacuagcccu

SEQ ID NO: 6562 - RNA, 19 nt, Artificial Sequence
  Description of Artificial Sequence: Synthetic oligonucleotide
agaaaaccgaaacuagccc

SEQ ID NO: 6563 - RNA, 19 nt, Artificial Sequence
  Description of Artificial Sequence: Synthetic oligonucleotide
cagaaaaccgaaacuagcc

SEQ ID NO: 6564 - RNA, 19 nt, Artificial Sequence
  Description of Artificial Sequence: Synthetic oligonucleotide
gcagaaaaccgaaacuagc

SEQ ID NO: 6565 - RNA, 19 nt, Artificial Sequence
  Description of Artificial Sequence: Synthetic oligonucleotide
ugcagaaaaccgaaacuag

SEQ ID NO: 6566 - RNA, 19 nt, Artificial Sequence
  Description of Artificial Sequence: Synthetic oligonucleotide
cugcagaaaaccgaaacua

SEQ ID NO: 6567 - RNA, 19 nt, Artificial Sequence
  Description of Artificial Sequence: Synthetic oligonucleotide
gcugcagaaaaccgaaacu

SEQ ID NO: 6568 - RNA, 19 nt, Artificial Sequence
  Description of Artificial Sequence: Synthetic oligonucleotide
ggcugcagaaaaccgaaac

SEQ ID NO: 6569 - RNA, 19 nt, Artificial Sequence
  Description of Artificial Sequence: Synthetic oligonucleotide
uggcugcagaaaaccgaaa

SEQ ID NO: 6570 - RNA, 19 nt, Artificial Sequence
  Description of Artificial Sequence: Synthetic oligonucleotide
auggcugcagaaaaccgaa

SEQ ID NO: 6571 - RNA, 19 nt, Artificial Sequence
  Description of Artificial Sequence: Synthetic oligonucleotide
aauggcugcagaaaaccga

SEQ ID NO: 6572 - RNA, 19 nt, Artificial Sequence
  Description of Artificial Sequence: Synthetic oligonucleotide
caauggcugcagaaaaccg

SEQ ID NO: 6573 - RNA, 19 nt, Artificial Sequence
  Description of Artificial Sequence: Synthetic oligonucleotide
gcaauggcugcagaaaacc

SEQ ID NO: 6574 - RNA, 19 nt, Artificial Sequence
  Description of Artificial Sequence: Synthetic oligonucleotide
cgcaauggcugcagaaaac

SEQ ID NO: 6575 - RNA, 19 nt, Artificial Sequence
  Description of Artificial Sequence: Synthetic oligonucleotide
ccgcaauggcugcagaaaa

SEQ ID NO: 6576 - RNA, 19 nt, Artificial Sequence
  Description of Artificial Sequence: Synthetic oligonucleotide
accgcaauggcugcagaaa

SEQ ID NO: 6577 - RNA, 19 nt, Artificial Sequence
  Description of Artificial Sequence: Synthetic oligonucleotide
aaccgcaauggcugcagaa

SEQ ID NO: 6578 - RNA, 19 nt, Artificial Sequence
  Description of Artificial Sequence: Synthetic oligonucleotide
uaaccgcaauggcugcaga

SEQ ID NO: 6579 - RNA, 19 nt, Artificial Sequence
  Description of Artificial Sequence: Synthetic oligonucleotide
uuaaccgcaauggcugcag

SEQ ID NO: 6580 - RNA, 19 nt, Artificial Sequence
  Description of Artificial Sequence: Synthetic oligonucleotide
uuuaaccgcaauggcugca

SEQ ID NO: 6581 - RNA, 19 nt, Artificial Sequence
  Description of Artificial Sequence: Synthetic oligonucleotide
uuuuaaccgcaauggcugc

SEQ ID NO: 6582 - RNA, 19 nt, Artificial Sequence
  Description of Artificial Sequence: Synthetic oligonucleotide
uuuuuaaccgcaauggcug

SEQ ID NO: 6583 - RNA, 19 nt, Artificial Sequence
  Description of Artificial Sequence: Synthetic oligonucleotide
uuuuuuaaccgcaauggcu

SEQ ID NO: 6584 - RNA, 19 nt, Artificial Sequence
  Description of Artificial Sequence: Synthetic oligonucleotide
auuuuuuaaccgcaauggc

SEQ ID NO: 6585 - RNA, 19 nt, Artificial Sequence
  Description of Artificial Sequence: Synthetic oligonucleotide
uauuuuuuaaccgcaaugg

SEQ ID NO: 6586 - RNA, 19 nt, Artificial Sequence
  Description of Artificial Sequence: Synthetic oligonucleotide
auauuuuuuaaccgcaaug

SEQ ID NO: 6587 - RNA, 19 nt, Artificial Sequence
  Description of Artificial Sequence: Synthetic oligonucleotide
uauauuuuuuaaccgcaau

SEQ ID NO: 6588 - RNA, 19 nt, Artificial Sequence
  Description of Artificial Sequence: Synthetic oligonucleotide
uuauauuuuuuaaccgcaa

SEQ ID NO: 6589 - RNA, 19 nt, Artificial Sequence
  Description of Artificial Sequence: Synthetic oligonucleotide
cuuauauuuuuuaaccgca

SEQ ID NO: 6590 - RNA, 19 nt, Artificial Sequence
  Description of Artificial Sequence: Synthetic oligonucleotide
acuuauauuuuuuaaccgc

SEQ ID NO: 6591 - RNA, 19 nt, Artificial Sequence
  Description of Artificial Sequence: Synthetic oligonucleotide
uacuuauauuuuuuaaccg

SEQ ID NO: 6592 - RNA, 19 nt, Artificial Sequence
  Description of Artificial Sequence: Synthetic oligonucleotide
cuacuuauauuuuuuaacc

SEQ ID NO: 6593 - RNA, 19 nt, Artificial Sequence
  Description of Artificial Sequence: Synthetic oligonucleotide
ccuacuuauauuuuuuaac

SEQ ID NO: 6594 - RNA, 19 nt, Artificial Sequence
  Description of Artificial Sequence: Synthetic oligonucleotide
uccuacuuauauuuuuuaa

SEQ ID NO: 6595 - RNA, 19 nt, Artificial Sequence
  Description of Artificial Sequence: Synthetic oligonucleotide
auccuacuuauauuuuuua

SEQ ID NO: 6596 - RNA, 19 nt, Artificial Sequence
  Description of Artificial Sequence: Synthetic oligonucleotide
uauccuacuuauauuuuuu

SEQ ID NO: 6597 - RNA, 19 nt, Artificial Sequence
  Description of Artificial Sequence: Synthetic oligonucleotide
uuauccuacuuauauuuuu

SEQ ID NO: 6598 - RNA, 19 nt, Artificial Sequence
  Description of Artificial Sequence: Synthetic oligonucleotide
guuauccuacuuauauuuu

SEQ ID NO: 6599 - RNA, 19 nt, Artificial Sequence
  Description of Artificial Sequence: Synthetic oligonucleotide
aguuauccuacuuauauuu

SEQ ID NO: 6600 - RNA, 19 nt, Artificial Sequence
  Description of Artificial Sequence: Synthetic oligonucleotide
aaguuauccuacuuauauu

SEQ ID NO: 6601 - RNA, 19 nt, Artificial Sequence
  Description of Artificial Sequence: Synthetic oligonucleotide
caaguuauccuacuuauau

SEQ ID NO: 6602 - RNA, 19 nt, Artificial Sequence
  Description of Artificial Sequence: Synthetic oligonucleotide
acaaguuauccuacuuaua

SEQ ID NO: 6603 - RNA, 19 nt, Artificial Sequence
  Description of Artificial Sequence: Synthetic oligonucleotide
uacaaguuauccuacuuau

SEQ ID NO: 6604 - RNA, 19 nt, Artificial Sequence
  Description of Artificial Sequence: Synthetic oligonucleotide
uuacaaguuauccuacuua

SEQ ID NO: 6605 - RNA, 19 nt, Artificial Sequence
  Description of Artificial Sequence: Synthetic oligonucleotide
uuuacaaguuauccuacuu

SEQ ID NO: 6606 - RNA, 19 nt, Artificial Sequence
  Description of Artificial Sequence: Synthetic oligonucleotide
uuuuacaaguuauccuacu

SEQ ID NO: 6607 - RNA, 19 nt, Artificial Sequence
  Description of Artificial Sequence: Synthetic oligonucleotide
guuuuacaaguuauccuac

SEQ ID NO: 6608 - RNA, 19 nt, Artificial Sequence
  Description of Artificial Sequence: Synthetic oligonucleotide
gguuuuacaaguuauccua

SEQ ID NO: 6609 - RNA, 19 nt, Artificial Sequence
  Description of Artificial Sequence: Synthetic oligonucleotide
agguuuuacaaguuauccu

SEQ ID NO: 6610 - RNA, 19 nt, Artificial Sequence
  Description of Artificial Sequence: Synthetic oligonucleotide
cagguuuuacaaguuaucc

SEQ ID NO: 6611 - RNA, 19 nt, Artificial Sequence
  Description of Artificial Sequence: Synthetic oligonucleotide
gcagguuuuacaaguuauc

SEQ ID NO: 6612 - RNA, 19 nt, Artificial Sequence
  Description of Artificial Sequence: Synthetic oligonucleotide
ugcagguuuuacaaguuau

SEQ ID NO: 6613 - RNA, 19 nt, Artificial Sequence
  Description of Artificial Sequence: Synthetic oligonucleotide
augcagguuuuacaaguua

SEQ ID NO: 6614 - RNA, 19 nt, Artificial Sequence
  Description of Artificial Sequence: Synthetic oligonucleotide
uaugcagguuuuacaaguu

SEQ ID NO: 6615 - RNA, 19 nt, Artificial Sequence
  Description of Artificial Sequence: Synthetic oligonucleotide
auaugcagguuuuacaagu

SEQ ID NO: 6616 - RNA, 19 nt, Artificial Sequence
  Description of Artificial Sequence: Synthetic oligonucleotide
aauaugcagguuuuacaag

SEQ ID NO: 6617 - RNA, 19 nt, Artificial Sequence
  Description of Artificial Sequence: Synthetic oligonucleotide
caauaugcagguuuuacaa

SEQ ID NO: 6618 - RNA, 19 nt, Artificial Sequence
  Description of Artificial Sequence: Synthetic oligonucleotide
gcaauaugcagguuuuaca

SEQ ID NO: 6619 - RNA, 19 nt, Artificial Sequence
  Description of Artificial Sequence: Synthetic oligonucleotide
agcaauaugcagguuuuac

SEQ ID NO: 6620 - RNA, 19 nt, Artificial Sequence
  Description of Artificial Sequence: Synthetic oligonucleotide
uagcaauaugcagguuuua

SEQ ID NO: 6621 - RNA, 19 nt, Artificial Sequence
  Description of Artificial Sequence: Synthetic oligonucleotide
uuagcaauaugcagguuuu

SEQ ID NO: 6622 - RNA, 19 nt, Artificial Sequence
  Description of Artificial Sequence: Synthetic oligonucleotide
auuagcaauaugcagguuu

SEQ ID NO: 6623 - RNA, 19 nt, Artificial Sequence
  Description of Artificial Sequence: Synthetic oligonucleotide
gauuagcaauaugcagguu

SEQ ID NO: 6624 - RNA, 19 nt, Artificial Sequence
  Description of Artificial Sequence: Synthetic oligonucleotide
agauuagcaauaugcaggu

SEQ ID NO: 6625 - RNA, 19 nt, Artificial Sequence
  Description of Artificial Sequence: Synthetic oligonucleotide
uagauuagcaauaugcagg

SEQ ID NO: 6626 - RNA, 19 nt, Artificial Sequence
  Description of Artificial Sequence: Synthetic oligonucleotide
auagauuagcaauaugcag

SEQ ID NO: 6627 - RNA, 19 nt, Artificial Sequence
  Description of Artificial Sequence: Synthetic oligonucleotide
uauagauuagcaauaugca

SEQ ID NO: 6628 - RNA, 19 nt, Artificial Sequence
  Description of Artificial Sequence: Synthetic oligonucleotide
cuauagauuagcaauaugc

SEQ ID NO: 6629 - RNA, 19 nt, Artificial Sequence
  Description of Artificial Sequence: Synthetic oligonucleotide
ucuauagauuagcaauaug

SEQ ID NO: 6630 - RNA, 19 nt, Artificial Sequence
  Description of Artificial Sequence: Synthetic oligonucleotide
gucuauagauuagcaauau

SEQ ID NO: 6631 - RNA, 19 nt, Artificial Sequence
  Description of Artificial Sequence: Synthetic oligonucleotide
ugucuauagauuagcaaua

SEQ ID NO: 6632 - RNA, 19 nt, Artificial Sequence
  Description of Artificial Sequence: Synthetic oligonucleotide
gugucuauagauuagcaau

SEQ ID NO: 6633 - RNA, 19 nt, Artificial Sequence
  Description of Artificial Sequence: Synthetic oligonucleotide
ggugucuauagauuagcaa

SEQ ID NO: 6634 - RNA, 19 nt, Artificial Sequence
  Description of Artificial Sequence: Synthetic oligonucleotide
uggugucuauagauuagca

SEQ ID NO: 6635 - RNA, 19 nt, Artificial Sequence
  Description of Artificial Sequence: Synthetic oligonucleotide
guggugucuauagauuagc

SEQ ID NO: 6636 - RNA, 19 nt, Artificial Sequence
  Description of Artificial Sequence: Synthetic oligonucleotide
uguggugucuauagauuag

SEQ ID NO: 6637 - RNA, 19 nt, Artificial Sequence
  Description of Artificial Sequence: Synthetic oligonucleotide
cuguggugucuauagauua

SEQ ID NO: 6638 - RNA, 19 nt, Artificial Sequence
  Description of Artificial Sequence: Synthetic oligonucleotide
acuguggugucuauagauu

SEQ ID NO: 6639 - RNA, 19 nt, Artificial Sequence
  Description of Artificial Sequence: Synthetic oligonucleotide
aacuguggugucuauagau

SEQ ID NO: 6640 - RNA, 19 nt, Artificial Sequence
  Description of Artificial Sequence: Synthetic oligonucleotide
aaacuguggugucuauaga

SEQ ID NO: 6641 - RNA, 19 nt, Artificial Sequence
  Description of Artificial Sequence: Synthetic oligonucleotide
gaaacuguggugucuauag

SEQ ID NO: 6642 - RNA, 19 nt, Artificial Sequence
  Description of Artificial Sequence: Synthetic oligonucleotide
agaaacuguggugucuaua

SEQ ID NO: 6643 - RNA, 19 nt, Artificial Sequence
  Description of Artificial Sequence: Synthetic oligonucleotide
uagaaacuguggugucuau

SEQ ID NO: 6644 - RNA, 19 nt, Artificial Sequence
  Description of Artificial Sequence: Synthetic oligonucleotide
uuagaaacuguggugucua

SEQ ID NO: 6645 - RNA, 19 nt, Artificial Sequence
  Description of Artificial Sequence: Synthetic oligonucleotide
uuuagaaacuguggugucu

SEQ ID NO: 6646 - RNA, 19 nt, Artificial Sequence
  Description of Artificial Sequence: Synthetic oligonucleotide
auuuagaaacugugguguc

SEQ ID NO: 6647 - RNA, 19 nt, Artificial Sequence
  Description of Artificial Sequence: Synthetic oligonucleotide
aauuuagaaacuguggugu

SEQ ID NO: 6648 - RNA, 19 nt, Artificial Sequence
  Description of Artificial Sequence: Synthetic oligonucleotide
gaauuuagaaacuguggug

SEQ ID NO: 6649 - RNA, 19 nt, Artificial Sequence
  Description of Artificial Sequence: Synthetic oligonucleotide
agaauuuagaaacuguggu

SEQ ID NO: 6650 - RNA, 19 nt, Artificial Sequence
  Description of Artificial Sequence: Synthetic oligonucleotide
aagaauuuagaaacugugg

SEQ ID NO: 6651 - RNA, 19 nt, Artificial Sequence
  Description of Artificial Sequence: Synthetic oligonucleotide
aaagaauuuagaaacugug

SEQ ID NO: 6652 - RNA, 19 nt, Artificial Sequence
  Description of Artificial Sequence: Synthetic oligonucleotide
caaagaauuuagaaacugu

SEQ ID NO: 6653 - RNA, 19 nt, Artificial Sequence
  Description of Artificial Sequence: Synthetic oligonucleotide
ucaaagaauuuagaaacug

SEQ ID NO: 6654 - RNA, 19 nt, Artificial Sequence
  Description of Artificial Sequence: Synthetic oligonucleotide
uucaaagaauuuagaaacu

SEQ ID NO: 6655 - RNA, 19 nt, Artificial Sequence
  Description of Artificial Sequence: Synthetic oligonucleotide
uuucaaagaauuuagaaac

SEQ ID NO: 6656 - RNA, 19 nt, Artificial Sequence
  Description of Artificial Sequence: Synthetic oligonucleotide
guuucaaagaauuuagaaa

SEQ ID NO: 6657 - RNA, 19 nt, Artificial Sequence
  Description of Artificial Sequence: Synthetic oligonucleotide
gguuucaaagaauuuagaa

SEQ ID NO: 6658 - RNA, 19 nt, Artificial Sequence
  Description of Artificial Sequence: Synthetic oligonucleotide
ugguuucaaagaauuuaga

SEQ ID NO: 6659 - RNA, 19 nt, Artificial Sequence
  Description of Artificial Sequence: Synthetic oligonucleotide
gugguuucaaagaauuuag

SEQ ID NO: 6660 - RNA, 19 nt, Artificial Sequence
  Description of Artificial Sequence: Synthetic oligonucleotide
agugguuucaaagaauuua

SEQ ID NO: 6661 - RNA, 19 nt, Artificial Sequence
  Description of Artificial Sequence: Synthetic oligonucleotide
aagugguuucaaagaauuu

SEQ ID NO: 6662 - RNA, 19 nt, Artificial Sequence
  Description of Artificial Sequence: Synthetic oligonucleotide
aaagugguuucaaagaauu

SEQ ID NO: 6663 - RNA, 19 nt, Artificial Sequence
  Description of Artificial Sequence: Synthetic oligonucleotide
uaaagugguuucaaagaau

SEQ ID NO: 6664 - RNA, 19 nt, Artificial Sequence
  Description of Artificial Sequence: Synthetic oligonucleotide
guaaagugguuucaaagaa

SEQ ID NO: 6665 - RNA, 19 nt, Artificial Sequence
  Description of Artificial Sequence: Synthetic oligonucleotide
aguaaagugguuucaaaga

SEQ ID NO: 6666 - RNA, 19 nt, Artificial Sequence
  Description of Artificial Sequence: Synthetic oligonucleotide
uaguaaagugguuucaaag

SEQ ID NO: 6667 - RNA, 19 nt, Artificial Sequence
  Description of Artificial Sequence: Synthetic oligonucleotide
guaguaaagugguuucaaa

SEQ ID NO: 6668 - RNA, 19 nt, Artificial Sequence
  Description of Artificial Sequence: Synthetic oligonucleotide
aguaguaaagugguuucaa

SEQ ID NO: 6669 - RNA, 19 nt, Artificial Sequence
  Description of Artificial Sequence: Synthetic oligonucleotide
aaguaguaaagugguuuca

SEQ ID NO: 6670 - RNA, 19 nt, Artificial Sequence
  Description of Artificial Sequence: Synthetic oligonucleotide
aaaguaguaaagugguuuc

SEQ ID NO: 6671 - RNA, 19 nt, Artificial Sequence
  Description of Artificial Sequence: Synthetic oligonucleotide
aaaaguaguaaagugguuu

SEQ ID NO: 6672 - RNA, 19 nt, Artificial Sequence
  Description of Artificial Sequence: Synthetic oligonucleotide
aaaaaguaguaaagugguu

SEQ ID NO: 6673 - RNA, 19 nt, Artificial Sequence
  Description of Artificial Sequence: Synthetic oligonucleotide
aaaaaaguaguaaaguggu

SEQ ID NO: 6674 - RNA, 19 nt, Artificial Sequence
  Description of Artificial Sequence: Synthetic oligonucleotide
aaaaaaaguaguaaagugg

SEQ ID NO: 6675 - RNA, 19 nt, Artificial Sequence
  Description of Artificial Sequence: Synthetic oligonucleotide
uaaaaaaaguaguaaagug

SEQ ID NO: 6676 - RNA, 19 nt, Artificial Sequence
  Description of Artificial Sequence: Synthetic oligonucleotide
uuaaaaaaaguaguaaagu

SEQ ID NO: 6677 - RNA, 19 nt, Artificial Sequence
  Description of Artificial Sequence: Synthetic oligonucleotide
uuuaaaaaaaguaguaaag

SEQ ID NO: 6678 - RNA, 19 nt, Artificial Sequence
  Description of Artificial Sequence: Synthetic oligonucleotide
guuuaaaaaaaguaguaaa

SEQ ID NO: 6679 - RNA, 19 nt, Artificial Sequence
  Description of Artificial Sequence: Synthetic oligonucleotide
aguuuaaaaaaaguaguaa

SEQ ID NO: 6680 - RNA, 19 nt, Artificial Sequence
  Description of Artificial Sequence: Synthetic oligonucleotide
aaguuuaaaaaaaguagua

SEQ ID NO: 6681 - RNA, 19 nt, Artificial Sequence
  Description of Artificial Sequence: Synthetic oligonucleotide
uaaguuuaaaaaaaguagu

SEQ ID NO: 6682 - RNA, 19 nt, Artificial Sequence
  Description of Artificial Sequence: Synthetic oligonucleotide
uuaaguuuaaaaaaaguag

SEQ ID NO: 6683 - RNA, 19 nt, Artificial Sequence
  Description of Artificial Sequence: Synthetic oligonucleotide
guuaaguuuaaaaaaagua

SEQ ID NO: 6684 - RNA, 19 nt, Artificial Sequence
  Description of Artificial Sequence: Synthetic oligonucleotide
aguuaaguuuaaaaaaagu

SEQ ID NO: 6685 - RNA, 19 nt, Artificial Sequence
  Description of Artificial Sequence: Synthetic oligonucleotide
gaguuaaguuuaaaaaaag

SEQ ID NO: 6686 - RNA, 19 nt, Artificial Sequence
  Description of Artificial Sequence: Synthetic oligonucleotide
ugaguuaaguuuaaaaaaa

SEQ ID NO: 6687 - RNA, 19 nt, Artificial Sequence
  Description of Artificial Sequence: Synthetic oligonucleotide
cugaguuaaguuuaaaaaa

SEQ ID NO: 6688 - RNA, 19 nt, Artificial Sequence
  Description of Artificial Sequence: Synthetic oligonucleotide
acugaguuaaguuuaaaaa

SEQ ID NO: 6689 - RNA, 19 nt, Artificial Sequence
  Description of Artificial Sequence: Synthetic oligonucleotide
aacugaguuaaguuuaaaa

SEQ ID NO: 6690 - RNA, 19 nt, Artificial Sequence
  Description of Artificial Sequence: Synthetic oligonucleotide
gaacugaguuaaguuuaaa

SEQ ID NO: 6691 - RNA, 19 nt, Artificial Sequence
  Description of Artificial Sequence: Synthetic oligonucleotide
agaacugaguuaaguuuaa

SEQ ID NO: 6692 - RNA, 19 nt, Artificial Sequence
  Description of Artificial Sequence: Synthetic oligonucleotide
uagaacugaguuaaguuua

SEQ ID NO: 6693 - RNA, 19 nt, Artificial Sequence
  Description of Artificial Sequence: Synthetic oligonucleotide
uuagaacugaguuaaguuu

SEQ ID NO: 6694 - RNA, 19 nt, Artificial Sequence
  Description of Artificial Sequence: Synthetic oligonucleotide
uuuagaacugaguuaaguu

SEQ ID NO: 6695 - RNA, 19 nt, Artificial Sequence
  Description of Artificial Sequence: Synthetic oligonucleotide
auuuagaacugaguuaagu

SEQ ID NO: 6696 - RNA, 19 nt, Artificial Sequence
  Description of Artificial Sequence: Synthetic oligonucleotide
uauuuagaacugaguuaag

SEQ ID NO: 6697 - RNA, 19 nt, Artificial Sequence
  Description of Artificial Sequence: Synthetic oligonucleotide
guauuuagaacugaguuaa

SEQ ID NO: 6698 - RNA, 19 nt, Artificial Sequence
  Description of Artificial Sequence: Synthetic oligonucleotide
aguauuuagaacugaguua

SEQ ID NO: 6699 - RNA, 19 nt, Artificial Sequence
  Description of Artificial Sequence: Synthetic oligonucleotide
aaguauuuagaacugaguu

SEQ ID NO: 6700 - RNA, 19 nt, Artificial Sequence
  Description of Artificial Sequence: Synthetic oligonucleotide
aaaguauuuagaacugagu

SEQ ID NO: 6701 - RNA, 19 nt, Artificial Sequence
  Description of Artificial Sequence: Synthetic oligonucleotide
caaaguauuuagaacugag

SEQ ID NO: 6702 - RNA, 19 nt, Artificial Sequence
  Description of Artificial Sequence: Synthetic oligonucleotide
acaaaguauuuagaacuga

SEQ ID NO: 6703 - RNA, 19 nt, Artificial Sequence
  Description of Artificial Sequence: Synthetic oligonucleotide
gacaaaguauuuagaacug

SEQ ID NO: 6704 - RNA, 19 nt, Artificial Sequence
  Description of Artificial Sequence: Synthetic oligonucleotide
agacaaaguauuuagaacu

SEQ ID NO: 6705 - RNA, 19 nt, Artificial Sequence
  Description of Artificial Sequence: Synthetic oligonucleotide
cagacaaaguauuuagaac

SEQ ID NO: 6706 - RNA, 19 nt, Artificial Sequence
  Description of Artificial Sequence: Synthetic oligonucleotide
ccagacaaaguauuuagaa

SEQ ID NO: 6707 - RNA, 19 nt, Artificial Sequence
  Description of Artificial Sequence: Synthetic oligonucleotide
uccagacaaaguauuuaga

SEQ ID NO: 6708 - RNA, 19 nt, Artificial Sequence
  Description of Artificial Sequence: Synthetic oligonucleotide
cuccagacaaaguauuuag

SEQ ID NO: 6709 - RNA, 19 nt, Artificial Sequence
  Description of Artificial Sequence: Synthetic oligonucleotide
gcuccagacaaaguauuua

SEQ ID NO: 6710 - RNA, 19 nt, Artificial Sequence
  Description of Artificial Sequence: Synthetic oligonucleotide
ugcuccagacaaaguauuu

SEQ ID NO: 6711 - RNA, 19 nt, Artificial Sequence
  Description of Artificial Sequence: Synthetic oligonucleotide
gugcuccagacaaaguauu

SEQ ID NO: 6712 - RNA, 19 nt, Artificial Sequence
  Description of Artificial Sequence: Synthetic oligonucleotide
ugugcuccagacaaaguau

SEQ ID NO: 6713 - RNA, 19 nt, Artificial Sequence
  Description of Artificial Sequence: Synthetic oligonucleotide
uugugcuccagacaaagua

SEQ ID NO: 6714 - RNA, 19 nt, Artificial Sequence
  Description of Artificial Sequence: Synthetic oligonucleotide
uuugugcuccagacaaagu

SEQ ID NO: 6715 - RNA, 19 nt, Artificial Sequence
  Description of Artificial Sequence: Synthetic oligonucleotide
uuuugugcuccagacaaag

SEQ ID NO: 6716 - RNA, 19 nt, Artificial Sequence
  Description of Artificial Sequence: Synthetic oligonucleotide
guuuugugcuccagacaaa

SEQ ID NO: 6717 - RNA, 19 nt, Artificial Sequence
  Description of Artificial Sequence: Synthetic oligonucleotide
uguuuugugcuccagacaa

SEQ ID NO: 6718 - RNA, 19 nt, Artificial Sequence
  Description of Artificial Sequence: Synthetic oligonucleotide
uuguuuugugcuccagaca

SEQ ID NO: 6719 - RNA, 19 nt, Artificial Sequence
  Description of Artificial Sequence: Synthetic oligonucleotide
auuguuuugugcuccagac

SEQ ID NO: 6720 - RNA, 19 nt, Artificial Sequence
  Description of Artificial Sequence: Synthetic oligonucleotide
uauuguuuugugcuccaga

SEQ ID NO: 6721 - RNA, 19 nt, Artificial Sequence
  Description of Artificial Sequence: Synthetic oligonucleotide
uuauuguuuugugcuccag

SEQ ID NO: 6722 - RNA, 19 nt, Artificial Sequence
  Description of Artificial Sequence: Synthetic oligonucleotide
uuuauuguuuugugcucca

SEQ ID NO: 6723 - RNA, 19 nt, Artificial Sequence
  Description of Artificial Sequence: Synthetic oligonucleotide
uuuuauuguuuugugcucc

SEQ ID NO: 6724 - RNA, 19 nt, Artificial Sequence
  Description of Artificial Sequence: Synthetic oligonucleotide
cuuuuauuguuuugugcuc

SEQ ID NO: 6725 - RNA, 19 nt, Artificial Sequence
  Description of Artificial Sequence: Synthetic oligonucleotide
ccuuuuauuguuuugugcu

SEQ ID NO: 6726 - RNA, 19 nt, Artificial Sequence
  Description of Artificial Sequence: Synthetic oligonucleotide
accuuuuauuguuuugugc

SEQ ID NO: 6727 - RNA, 19 nt, Artificial Sequence
  Description of Artificial Sequence: Synthetic oligonucleotide
aaccuuuuauuguuuugug

SEQ ID NO: 6728 - RNA, 19 nt, Artificial Sequence
  Description of Artificial Sequence: Synthetic oligonucleotide
uaaccuuuuauuguuuugu

SEQ ID NO: 6729 - RNA, 19 nt, Artificial Sequence
  Description of Artificial Sequence: Synthetic oligonucleotide
auaaccuuuuauuguuuug

SEQ ID NO: 6730 - RNA, 19 nt, Artificial Sequence
  Description of Artificial Sequence: Synthetic oligonucleotide
gauaaccuuuuauuguuuu

SEQ ID NO: 6731 - RNA, 19 nt, Artificial Sequence
  Description of Artificial Sequence: Synthetic oligonucleotide
agauaaccuuuuauuguuu

SEQ ID NO: 6732 - RNA, 19 nt, Artificial Sequence
  Description of Artificial Sequence: Synthetic oligonucleotide
aagauaaccuuuuauuguu

SEQ ID NO: 6733 - RNA, 19 nt, Artificial Sequence
  Description of Artificial Sequence: Synthetic oligonucleotide
uaagauaaccuuuuauugu

SEQ ID NO: 6734 - RNA, 19 nt, Artificial Sequence
  Description of Artificial Sequence: Synthetic oligonucleotide
auaagauaaccuuuuauug

SEQ ID NO: 6735 - RNA, 19 nt, Artificial Sequence
  Description of Artificial Sequence: Synthetic oligonucleotide
uauaagauaaccuuuuauu

SEQ ID NO: 6736 - RNA, 19 nt, Artificial Sequence
  Description of Artificial Sequence: Synthetic oligonucleotide
cuauaagauaaccuuuuau

SEQ ID NO: 6737 - RNA, 19 nt, Artificial Sequence
  Description of Artificial Sequence: Synthetic oligonucleotide
acuauaagauaaccuuuua

SEQ ID NO: 6738 - RNA, 19 nt, Artificial Sequence
  Description of Artificial Sequence: Synthetic oligonucleotide
gacuauaagauaaccuuuu

SEQ ID NO: 6739 - RNA, 19 nt, Artificial Sequence
  Description of Artificial Sequence: Synthetic oligonucleotide
cgacuauaagauaaccuuu

SEQ ID NO: 6740 - RNA, 19 nt, Artificial Sequence
  Description of Artificial Sequence: Synthetic oligonucleotide
acgacuauaagauaaccuu

SEQ ID NO: 6741 - RNA, 19 nt, Artificial Sequence
  Description of Artificial Sequence: Synthetic oligonucleotide
cacgacuauaagauaaccu

SEQ ID NO: 6742 - RNA, 19 nt, Artificial Sequence
  Description of Artificial Sequence: Synthetic oligonucleotide
ucacgacuauaagauaacc

SEQ ID NO: 6743 - RNA, 19 nt, Artificial Sequence
  Description of Artificial Sequence: Synthetic oligonucleotide
gucacgacuauaagauaac

SEQ ID NO: 6744 - RNA, 19 nt, Artificial Sequence
  Description of Artificial Sequence: Synthetic oligonucleotide
agucacgacuauaagauaa

SEQ ID NO: 6745 - RNA, 19 nt, Artificial Sequence
  Description of Artificial Sequence: Synthetic oligonucleotide
aagucacgacuauaagaua

SEQ ID NO: 6746 - RNA, 19 nt, Artificial Sequence
  Description of Artificial Sequence: Synthetic oligonucleotide
aaagucacgacuauaagau

SEQ ID NO: 6747 - RNA, 19 nt, Artificial Sequence
  Description of Artificial Sequence: Synthetic oligonucleotide
uaaagucacgacuauaaga

SEQ ID NO: 6748 - RNA, 19 nt, Artificial Sequence
  Description of Artificial Sequence: Synthetic oligonucleotide
uuaaagucacgacuauaag

SEQ ID NO: 6749 - RNA, 19 nt, Artificial Sequence
  Description of Artificial Sequence: Synthetic oligonucleotide
uuuaaagucacgacuauaa

SEQ ID NO: 6750 - RNA, 19 nt, Artificial Sequence
  Description of Artificial Sequence: Synthetic oligonucleotide
guuuaaagucacgacuaua

SEQ ID NO: 6751 - RNA, 19 nt, Artificial Sequence
  Description of Artificial Sequence: Synthetic oligonucleotide
aguuuaaagucacgacuau

SEQ ID NO: 6752 - RNA, 19 nt, Artificial Sequence
  Description of Artificial Sequence: Synthetic oligonucleotide
aaguuuaaagucacgacua

SEQ ID NO: 6753 - RNA, 19 nt, Artificial Sequence
  Description of Artificial Sequence: Synthetic oligonucleotide
aaaguuuaaagucacgacu

SEQ ID NO: 6754 - RNA, 19 nt, Artificial Sequence
  Description of Artificial Sequence: Synthetic oligonucleotide
aaaaguuuaaagucacgac

SEQ ID NO: 6755 - RNA, 19 nt, Artificial Sequence
  Description of Artificial Sequence: Synthetic oligonucleotide
caaaaguuuaaagucacga

SEQ ID NO: 6756 - RNA, 19 nt, Artificial Sequence
  Description of Artificial Sequence: Synthetic oligonucleotide
acaaaaguuuaaagucacg

SEQ ID NO: 6757 - RNA, 19 nt, Artificial Sequence
  Description of Artificial Sequence: Synthetic oligonucleotide
uacaaaaguuuaaagucac

SEQ ID NO: 6758 - RNA, 19 nt, Artificial Sequence
  Description of Artificial Sequence: Synthetic oligonucleotide
cuacaaaaguuuaaaguca

SEQ ID NO: 6759 - RNA, 19 nt, Artificial Sequence
  Description of Artificial Sequence: Synthetic oligonucleotide
ucuacaaaaguuuaaaguc

SEQ ID NO: 6760 - RNA, 19 nt, Artificial Sequence
  Description of Artificial Sequence: Synthetic oligonucleotide
gucuacaaaaguuuaaagu

SEQ ID NO: 6761 - RNA, 19 nt, Artificial Sequence
  Description of Artificial Sequence: Synthetic oligonucleotide
ggucuacaaaaguuuaaag

SEQ ID NO: 6762 - RNA, 19 nt, Artificial Sequence
  Description of Artificial Sequence: Synthetic oligonucleotide
uggucuacaaaaguuuaaa

SEQ ID NO: 6763 - RNA, 19 nt, Artificial Sequence
  Description of Artificial Sequence: Synthetic oligonucleotide
guggucuacaaaaguuuaa

SEQ ID NO: 6764 - RNA, 19 nt, Artificial Sequence
  Description of Artificial Sequence: Synthetic oligonucleotide
uguggucuacaaaaguuua

SEQ ID NO: 6765 - RNA, 19 nt, Artificial Sequence
  Description of Artificial Sequence: Synthetic oligonucleotide
uuguggucuacaaaaguuu

SEQ ID NO: 6766 - RNA, 19 nt, Artificial Sequence
  Description of Artificial Sequence: Synthetic oligonucleotide
auuguggucuacaaaaguu

SEQ ID NO: 6767 - RNA, 19 nt, Artificial Sequence
  Description of Artificial Sequence: Synthetic oligonucleotide
aauuguggucuacaaaagu

SEQ ID NO: 6768 - RNA, 19 nt, Artificial Sequence
  Description of Artificial Sequence: Synthetic oligonucleotide
gaauuguggucuacaaaag

SEQ ID NO: 6769 - RNA, 19 nt, Artificial Sequence
  Description of Artificial Sequence: Synthetic oligonucleotide
ugaauuguggucuacaaaa

SEQ ID NO: 6770 - RNA, 19 nt, Artificial Sequence
  Description of Artificial Sequence: Synthetic oligonucleotide
gugaauuguggucuacaaa

SEQ ID NO: 6771 - RNA, 19 nt, Artificial Sequence
  Description of Artificial Sequence: Synthetic oligonucleotide
agugaauuguggucuacaa

SEQ ID NO: 6772 - RNA, 19 nt, Artificial Sequence
  Description of Artificial Sequence: Synthetic oligonucleotide
aagugaauuguggucuaca

SEQ ID NO: 6773 - RNA, 19 nt, Artificial Sequence
  Description of Artificial Sequence: Synthetic oligonucleotide
aaagugaauuguggucuac

SEQ ID NO: 6774 - RNA, 19 nt, Artificial Sequence
  Description of Artificial Sequence: Synthetic oligonucleotide
aaaagugaauuguggucua

SEQ ID NO: 6775 - RNA, 19 nt, Artificial Sequence
  Description of Artificial Sequence: Synthetic oligonucleotide
aaaaagugaauuguggucu

SEQ ID NO: 6776 - RNA, 19 nt, Artificial Sequence
  Description of Artificial Sequence: Synthetic oligonucleotide
uaaaaagugaauugugguc

SEQ ID NO: 6777 - RNA, 19 nt, Artificial Sequence
  Description of Artificial Sequence: Synthetic oligonucleotide
cuaaaaagugaauuguggu

SEQ ID NO: 6778 - RNA, 19 nt, Artificial Sequence
  Description of Artificial Sequence: Synthetic oligonucleotide
acuaaaaagugaauugugg

SEQ ID NO: 6779 - RNA, 19 nt, Artificial Sequence
  Description of Artificial Sequence: Synthetic oligonucleotide
aacuaaaaagugaauugug

SEQ ID NO: 6780 - RNA, 19 nt, Artificial Sequence
  Description of Artificial Sequence: Synthetic oligonucleotide
aaacuaaaaagugaauugu

SEQ ID NO: 6781 - RNA, 19 nt, Artificial Sequence
  Description of Artificial Sequence: Synthetic oligonucleotide
aaaacuaaaaagugaauug

SEQ ID NO: 6782 - RNA, 19 nt, Artificial Sequence
  Description of Artificial Sequence: Synthetic oligonucleotide
gaaaacuaaaaagugaauu

SEQ ID NO: 6783 - RNA, 19 nt, Artificial Sequence
  Description of Artificial Sequence: Synthetic oligonucleotide
agaaaacuaaaaagugaau

SEQ ID NO: 6784 - RNA, 19 nt, Artificial Sequence
  Description of Artificial Sequence: Synthetic oligonucleotide
aagaaaacuaaaaagugaa

SEQ ID NO: 6785 - RNA, 19 nt, Artificial Sequence
  Description of Artificial Sequence: Synthetic oligonucleotide
aaagaaaacuaaaaaguga

SEQ ID NO: 6786 - RNA, 19 nt, Artificial Sequence
  Description of Artificial Sequence: Synthetic oligonucleotide
aaaagaaaacuaaaaagug

SEQ ID NO: 6787 - RNA, 19 nt, Artificial Sequence
  Description of Artificial Sequence: Synthetic oligonucleotide
uaaaagaaaacuaaaaagu

SEQ ID NO: 6788 - RNA, 19 nt, Artificial Sequence
  Description of Artificial Sequence: Synthetic oligonucleotide
guaaaagaaaacuaaaaag

SEQ ID NO: 6789 - RNA, 19 nt, Artificial Sequence
  Description of Artificial Sequence: Synthetic oligonucleotide
aguaaaagaaaacuaaaaa

SEQ ID NO: 6790 - RNA, 19 nt, Artificial Sequence
  Description of Artificial Sequence: Synthetic oligonucleotide
aaguaaaagaaaacuaaaa

SEQ ID NO: 6791 - RNA, 19 nt, Artificial Sequence
  Description of Artificial Sequence: Synthetic oligonucleotide
uaaguaaaagaaaacuaaa

SEQ ID NO: 6792 - RNA, 19 nt, Artificial Sequence
  Description of Artificial Sequence: Synthetic oligonucleotide
uuaaguaaaagaaaacuaa

SEQ ID NO: 6793 - RNA, 19 nt, Artificial Sequence
  Description of Artificial Sequence: Synthetic oligonucleotide
uuuaaguaaaagaaaacua

SEQ ID NO: 6794 - RNA, 19 nt, Artificial Sequence
  Description of Artificial Sequence: Synthetic oligonucleotide
auuuaaguaaaagaaaacu

SEQ ID NO: 6795 - RNA, 19 nt, Artificial Sequence
  Description of Artificial Sequence: Synthetic oligonucleotide
gauuuaaguaaaagaaaac

SEQ ID NO: 6796 - RNA, 19 nt, Artificial Sequence
  Description of Artificial Sequence: Synthetic oligonucleotide
ggauuuaaguaaaagaaaa

SEQ ID NO: 6797 - RNA, 19 nt, Artificial Sequence
  Description of Artificial Sequence: Synthetic oligonucleotide
gggauuuaaguaaaagaaa

SEQ ID NO: 6798 - RNA, 19 nt, Artificial Sequence
  Description of Artificial Sequence: Synthetic oligonucleotide
ugggauuuaaguaaaagaa

SEQ ID NO: 6799 - RNA, 19 nt, Artificial Sequence
  Description of Artificial Sequence: Synthetic oligonucleotide
augggauuuaaguaaaaga

SEQ ID NO: 6800 - RNA, 19 nt, Artificial Sequence
  Description of Artificial Sequence: Synthetic oligonucleotide
gaugggauuuaaguaaaag

SEQ ID NO: 6801 - RNA, 19 nt, Artificial Sequence
  Description of Artificial Sequence: Synthetic oligonucleotide
agaugggauuuaaguaaaa

SEQ ID NO: 6802 - RNA, 19 nt, Artificial Sequence
  Description of Artificial Sequence: Synthetic oligonucleotide
cagaugggauuuaaguaaa

SEQ ID NO: 6803 - RNA, 19 nt, Artificial Sequence
  Description of Artificial Sequence: Synthetic oligonucleotide
gcagaugggauuuaaguaa

SEQ ID NO: 6804 - RNA, 19 nt, Artificial Sequence
  Description of Artificial Sequence: Synthetic oligonucleotide
ugcagaugggauuuaagua

SEQ ID NO: 6805 - RNA, 19 nt, Artificial Sequence
  Description of Artificial Sequence: Synthetic oligonucleotide
cugcagaugggauuuaagu

SEQ ID NO: 6806 - RNA, 19 nt, Artificial Sequence
  Description of Artificial Sequence: Synthetic oligonucleotide
acugcagaugggauuuaag

SEQ ID NO: 6807 - RNA, 19 nt, Artificial Sequence
  Description of Artificial Sequence: Synthetic oligonucleotide
gacugcagaugggauuuaa

SEQ ID NO: 6808 - RNA, 19 nt, Artificial Sequence
  Description of Artificial Sequence: Synthetic oligonucleotide
agacugcagaugggauuua

SEQ ID NO: 6809 - RNA, 19 nt, Artificial Sequence
  Description of Artificial Sequence: Synthetic oligonucleotide
gagacugcagaugggauuu

SEQ ID NO: 6810 - RNA, 19 nt, Artificial Sequence
  Description of Artificial Sequence: Synthetic oligonucleotide
ugagacugcagaugggauu

SEQ ID NO: 6811 - RNA, 19 nt, Artificial Sequence
  Description of Artificial Sequence: Synthetic oligonucleotide
uugagacugcagaugggau

SEQ ID NO: 6812 - RNA, 19 nt, Artificial Sequence
  Description of Artificial Sequence: Synthetic oligonucleotide
uuugagacugcagauggga

SEQ ID NO: 6813 - RNA, 19 nt, Artificial Sequence
  Description of Artificial Sequence: Synthetic oligonucleotide
auuugagacugcagauggg

SEQ ID NO: 6814 - RNA, 19 nt, Artificial Sequence
  Description of Artificial Sequence: Synthetic oligonucleotide
aauuugagacugcagaugg

SEQ ID NO: 6815 - RNA, 19 nt, Artificial Sequence
  Description of Artificial Sequence: Synthetic oligonucleotide
aaauuugagacugcagaug

SEQ ID NO: 6816 - RNA, 19 nt, Artificial Sequence
  Description of Artificial Sequence: Synthetic oligonucleotide
uaaauuugagacugcagau

SEQ ID NO: 6817 - RNA, 19 nt, Artificial Sequence
  Description of Artificial Sequence: Synthetic oligonucleotide
uuaaauuugagacugcaga

SEQ ID NO: 6818 - RNA, 19 nt, Artificial Sequence
  Description of Artificial Sequence: Synthetic oligonucleotide
cuuaaauuugagacugcag

SEQ ID NO: 6819 - RNA, 19 nt, Artificial Sequence
  Description of Artificial Sequence: Synthetic oligonucleotide
acuuaaauuugagacugca

SEQ ID NO: 6820 - RNA, 19 nt, Artificial Sequence
  Description of Artificial Sequence: Synthetic oligonucleotide
aacuuaaauuugagacugc

SEQ ID NO: 6821 - RNA, 19 nt, Artificial Sequence
  Description of Artificial Sequence: Synthetic oligonucleotide
gaacuuaaauuugagacug

SEQ ID NO: 6822 - RNA, 19 nt, Artificial Sequence
  Description of Artificial Sequence: Synthetic oligonucleotide
agaacuuaaauuugagacu

SEQ ID NO: 6823 - RNA, 19 nt, Artificial Sequence
  Description of Artificial Sequence: Synthetic oligonucleotide
gagaacuuaaauuugagac

SEQ ID NO: 6824 - RNA, 19 nt, Artificial Sequence
  Description of Artificial Sequence: Synthetic oligonucleotide
ggagaacuuaaauuugaga

SEQ ID NO: 6825 - RNA, 19 nt, Artificial Sequence
  Description of Artificial Sequence: Synthetic oligonucleotide
gggagaacuuaaauuugag

SEQ ID NO: 6826 - RNA, 19 nt, Artificial Sequence
  Description of Artificial Sequence: Synthetic oligonucleotide
ugggagaacuuaaauuuga

SEQ ID NO: 6827 - RNA, 19 nt, Artificial Sequence
  Description of Artificial Sequence: Synthetic oligonucleotide
cugggagaacuuaaauuug

SEQ ID NO: 6828 - RNA, 19 nt, Artificial Sequence
  Description of Artificial Sequence: Synthetic oligonucleotide
acugggagaacuuaaauuu

SEQ ID NO: 6829 - RNA, 19 nt, Artificial Sequence
  Description of Artificial Sequence: Synthetic oligonucleotide
uacugggagaacuuaaauu

SEQ ID NO: 6830 - RNA, 19 nt, Artificial Sequence
  Description of Artificial Sequence: Synthetic oligonucleotide
cuacugggagaacuuaaau

SEQ ID NO: 6831 - RNA, 19 nt, Artificial Sequence
  Description of Artificial Sequence: Synthetic oligonucleotide
ucuacugggagaacuuaaa

SEQ ID NO: 6832 - RNA, 19 nt, Artificial Sequence
  Description of Artificial Sequence: Synthetic oligonucleotide
cucuacugggagaacuuaa

SEQ ID NO: 6833 - RNA, 19 nt, Artificial Sequence
  Description of Artificial Sequence: Synthetic oligonucleotide
ucucuacugggagaacuua

SEQ ID NO: 6834 - RNA, 19 nt, Artificial Sequence
  Description of Artificial Sequence: Synthetic oligonucleotide
aucucuacugggagaacuu

SEQ ID NO: 6835 - RNA, 19 nt, Artificial Sequence
  Description of Artificial Sequence: Synthetic oligonucleotide
aaucucuacugggagaacu

SEQ ID NO: 6836 - RNA, 19 nt, Artificial Sequence
  Description of Artificial Sequence: Synthetic oligonucleotide
caaucucuacugggagaac

SEQ ID NO: 6837 - RNA, 19 nt, Artificial Sequence
  Description of Artificial Sequence: Synthetic oligonucleotide
ucaaucucuacugggagaa

SEQ ID NO: 6838 - RNA, 19 nt, Artificial Sequence
  Description of Artificial Sequence: Synthetic oligonucleotide
cucaaucucuacugggaga

SEQ ID NO: 6839 - RNA, 19 nt, Artificial Sequence
  Description of Artificial Sequence: Synthetic oligonucleotide
acucaaucucuacugggag

SEQ ID NO: 6840 - RNA, 19 nt, Artificial Sequence
  Description of Artificial Sequence: Synthetic oligonucleotide
aacucaaucucuacuggga

SEQ ID NO: 6841 - RNA, 19 nt, Artificial Sequence
  Description of Artificial Sequence: Synthetic oligonucleotide
aaacucaaucucuacuggg

SEQ ID NO: 6842 - RNA, 19 nt, Artificial Sequence
  Description of Artificial Sequence: Synthetic oligonucleotide
caaacucaaucucuacugg

SEQ ID NO: 6843 - RNA, 19 nt, Artificial Sequence
  Description of Artificial Sequence: Synthetic oligonucleotide
ucaaacucaaucucuacug

SEQ ID NO: 6844 - RNA, 19 nt, Artificial Sequence
  Description of Artificial Sequence: Synthetic oligonucleotide
cucaaacucaaucucuacu

SEQ ID NO: 6845 - RNA, 19 nt, Artificial Sequence
  Description of Artificial Sequence: Synthetic oligonucleotide
gcucaaacucaaucucuac

SEQ ID NO: 6846 - RNA, 19 nt, Artificial Sequence
  Description of Artificial Sequence: Synthetic oligonucleotide
ggcucaaacucaaucucua

SEQ ID NO: 6847 - RNA, 19 nt, Artificial Sequence
  Description of Artificial Sequence: Synthetic oligonucleotide
aggcucaaacucaaucucu

SEQ ID NO: 6848 - RNA, 19 nt, Artificial Sequence
  Description of Artificial Sequence: Synthetic oligonucleotide
caggcucaaacucaaucuc

SEQ ID NO: 6849 - RNA, 19 nt, Artificial Sequence
  Description of Artificial Sequence: Synthetic oligonucleotide
acaggcucaaacucaaucu

SEQ ID NO: 6850 - RNA, 19 nt, Artificial Sequence
  Description of Artificial Sequence: Synthetic oligonucleotide
uacaggcucaaacucaauc

SEQ ID NO: 6851 - RNA, 19 nt, Artificial Sequence
  Description of Artificial Sequence: Synthetic oligonucleotide
auacaggcucaaacucaau

SEQ ID NO: 6852 - RNA, 19 nt, Artificial Sequence
  Description of Artificial Sequence: Synthetic oligonucleotide
uauacaggcucaaacucaa

SEQ ID NO: 6853 - RNA, 19 nt, Artificial Sequence
  Description of Artificial Sequence: Synthetic oligonucleotide
auauacaggcucaaacuca

SEQ ID NO: 6854 - RNA, 19 nt, Artificial Sequence
  Description of Artificial Sequence: Synthetic oligonucleotide
gauauacaggcucaaacuc

SEQ ID NO: 6855 - RNA, 19 nt, Artificial Sequence
  Description of Artificial Sequence: Synthetic oligonucleotide
agauauacaggcucaaacu

SEQ ID NO: 6856 - RNA, 19 nt, Artificial Sequence
  Description of Artificial Sequence: Synthetic oligonucleotide
uagauauacaggcucaaac

SEQ ID NO: 6857 - RNA, 19 nt, Artificial Sequence
  Description of Artificial Sequence: Synthetic oligonucleotide
auagauauacaggcucaaa

SEQ ID NO: 6858 - RNA, 19 nt, Artificial Sequence
  Description of Artificial Sequence: Synthetic oligonucleotide
aauagauauacaggcucaa

SEQ ID NO: 6859 - RNA, 19 nt, Artificial Sequence
  Description of Artificial Sequence: Synthetic oligonucleotide
uaauagauauacaggcuca

SEQ ID NO: 6860 - RNA, 19 nt, Artificial Sequence
  Description of Artificial Sequence: Synthetic oligonucleotide
uuaauagauauacaggcuc

SEQ ID NO: 6861 - RNA, 19 nt, Artificial Sequence
  Description of Artificial Sequence: Synthetic oligonucleotide
uuuaauagauauacaggcu

SEQ ID NO: 6862 - RNA, 19 nt, Artificial Sequence
  Description of Artificial Sequence: Synthetic oligonucleotide
uuuuaauagauauacaggc

SEQ ID NO: 6863 - RNA, 19 nt, Artificial Sequence
  Description of Artificial Sequence: Synthetic oligonucleotide
uuuuuaauagauauacagg

SEQ ID NO: 6864 - RNA, 19 nt, Artificial Sequence
  Description of Artificial Sequence: Synthetic oligonucleotide
auuuuuaauagauauacag

SEQ ID NO: 6865 - RNA, 19 nt, Artificial Sequence
  Description of Artificial Sequence: Synthetic oligonucleotide
aauuuuuaauagauauaca

SEQ ID NO: 6866 - RNA, 19 nt, Artificial Sequence
  Description of Artificial Sequence: Synthetic oligonucleotide
aaauuuuuaauagauauac

SEQ ID NO: 6867 - RNA, 19 nt, Artificial Sequence
  Description of Artificial Sequence: Synthetic oligonucleotide
gaaauuuuuaauagauaua

SEQ ID NO: 6868 - RNA, 19 nt, Artificial Sequence
  Description of Artificial Sequence: Synthetic oligonucleotide
ugaaauuuuuaauagauau

SEQ ID NO: 6869 - RNA, 19 nt, Artificial Sequence
  Description of Artificial Sequence: Synthetic oligonucleotide
uugaaauuuuuaauagaua

SEQ ID NO: 6870 - RNA, 19 nt, Artificial Sequence
  Description of Artificial Sequence: Synthetic oligonucleotide
guugaaauuuuuaauagau

SEQ ID NO: 6871 - RNA, 19 nt, Artificial Sequence
  Description of Artificial Sequence: Synthetic oligonucleotide
aguugaaauuuuuaauaga

SEQ ID NO: 6872 - RNA, 19 nt, Artificial Sequence
  Description of Artificial Sequence: Synthetic oligonucleotide
aaguugaaauuuuuaauag

SEQ ID NO: 6873 - RNA, 19 nt, Artificial Sequence
  Description of Artificial Sequence: Synthetic oligonucleotide
gaaguugaaauuuuuaaua

SEQ ID NO: 6874 - RNA, 19 nt, Artificial Sequence
  Description of Artificial Sequence: Synthetic oligonucleotide
ggaaguugaaauuuuuaau

SEQ ID NO: 6875 - RNA, 19 nt, Artificial Sequence
  Description of Artificial Sequence: Synthetic oligonucleotide
gggaaguugaaauuuuuaa

SEQ ID NO: 6876 - RNA, 19 nt, Artificial Sequence
  Description of Artificial Sequence: Synthetic oligonucleotide
ugggaaguugaaauuuuua

SEQ ID NO: 6877 - RNA, 19 nt, Artificial Sequence
  Description of Artificial Sequence: Synthetic oligonucleotide
gugggaaguugaaauuuuu

SEQ ID NO: 6878 - RNA, 19 nt, Artificial Sequence
  Description of Artificial Sequence: Synthetic oligonucleotide
ugugggaaguugaaauuuu

SEQ ID NO: 6879 - RNA, 19 nt, Artificial Sequence
  Description of Artificial Sequence: Synthetic oligonucleotide
augugggaaguugaaauuu

SEQ ID NO: 6880 - RNA, 19 nt, Artificial Sequence
  Description of Artificial Sequence: Synthetic oligonucleotide
uaugugggaaguugaaauu

SEQ ID NO: 6881 - RNA, 19 nt, Artificial Sequence
  Description of Artificial Sequence: Synthetic oligonucleotide
auaugugggaaguugaaau

SEQ ID NO: 6882 - RNA, 19 nt, Artificial Sequence
  Description of Artificial Sequence: Synthetic oligonucleotide
uauaugugggaaguugaaa

SEQ ID NO: 6883 - RNA, 19 nt, Artificial Sequence
  Description of Artificial Sequence: Synthetic oligonucleotide
auauaugugggaaguugaa

SEQ ID NO: 6884 - RNA, 19 nt, Artificial Sequence
  Description of Artificial Sequence: Synthetic oligonucleotide
aauauaugugggaaguuga

SEQ ID NO: 6885 - RNA, 19 nt, Artificial Sequence
  Description of Artificial Sequence: Synthetic oligonucleotide
aaauauaugugggaaguug

SEQ ID NO: 6886 - RNA, 19 nt, Artificial Sequence
  Description of Artificial Sequence: Synthetic oligonucleotide
uaaauauaugugggaaguu

SEQ ID NO: 6887 - RNA, 19 nt, Artificial Sequence
  Description of Artificial Sequence: Synthetic oligonucleotide
guaaauauaugugggaagu

SEQ ID NO: 6888 - RNA, 19 nt, Artificial Sequence
  Description of Artificial Sequence: Synthetic oligonucleotide
aguaaauauaugugggaag

SEQ ID NO: 6889 - RNA, 19 nt, Artificial Sequence
  Description of Artificial Sequence: Synthetic oligonucleotide
uaguaaauauaugugggaa

SEQ ID NO: 6890 - RNA, 19 nt, Artificial Sequence
  Description of Artificial Sequence: Synthetic oligonucleotide
uuaguaaauauauguggga

SEQ ID NO: 6891 - RNA, 19 nt, Artificial Sequence
  Description of Artificial Sequence: Synthetic oligonucleotide
cuuaguaaauauauguggg

SEQ ID NO: 6892 - RNA, 19 nt, Artificial Sequence
  Description of Artificial Sequence: Synthetic oligonucleotide
ucuuaguaaauauaugugg

SEQ ID NO: 6893 - RNA, 19 nt, Artificial Sequence
  Description of Artificial Sequence: Synthetic oligonucleotide
aucuuaguaaauauaugug

SEQ ID NO: 6894 - RNA, 19 nt, Artificial Sequence
  Description of Artificial Sequence: Synthetic oligonucleotide
caucuuaguaaauauaugu

SEQ ID NO: 6895 - RNA, 19 nt, Artificial Sequence
  Description of Artificial Sequence: Synthetic oligonucleotide
ucaucuuaguaaauauaug

SEQ ID NO: 6896 - RNA, 19 nt, Artificial Sequence
  Description of Artificial Sequence: Synthetic oligonucleotide
aucaucuuaguaaauauau

SEQ ID NO: 6897 - RNA, 19 nt, Artificial Sequence
  Description of Artificial Sequence: Synthetic oligonucleotide
aaucaucuuaguaaauaua

SEQ ID NO: 6898 - RNA, 19 nt, Artificial Sequence
  Description of Artificial Sequence: Synthetic oligonucleotide
uaaucaucuuaguaaauau

SEQ ID NO: 6899 - RNA, 19 nt, Artificial Sequence
  Description of Artificial Sequence: Synthetic oligonucleotide
uuaaucaucuuaguaaaua

SEQ ID NO: 6900 - RNA, 19 nt, Artificial Sequence
  Description of Artificial Sequence: Synthetic oligonucleotide
cuuaaucaucuuaguaaau

SEQ ID NO: 6901 - RNA, 19 nt, Artificial Sequence
  Description of Artificial Sequence: Synthetic oligonucleotide
ucuuaaucaucuuaguaaa

SEQ ID NO: 6902 - RNA, 19 nt, Artificial Sequence
  Description of Artificial Sequence: Synthetic oligonucleotide
gucuuaaucaucuuaguaa

SEQ ID NO: 6903 - RNA, 19 nt, Artificial Sequence
  Description of Artificial Sequence: Synthetic oligonucleotide
agucuuaaucaucuuagua

SEQ ID NO: 6904 - RNA, 19 nt, Artificial Sequence
  Description of Artificial Sequence: Synthetic oligonucleotide
aagucuuaaucaucuuagu

SEQ ID NO: 6905 - RNA, 19 nt, Artificial Sequence
  Description of Artificial Sequence: Synthetic oligonucleotide
uaagucuuaaucaucuuag

SEQ ID NO: 6906 - RNA, 19 nt, Artificial Sequence
  Description of Artificial Sequence: Synthetic oligonucleotide
guaagucuuaaucaucuua

SEQ ID NO: 6907 - RNA, 19 nt, Artificial Sequence
  Description of Artificial Sequence: Synthetic oligonucleotide
uguaagucuuaaucaucuu

SEQ ID NO: 6908 - RNA, 19 nt, Artificial Sequence
  Description of Artificial Sequence: Synthetic oligonucleotide
auguaagucuuaaucaucu

SEQ ID NO: 6909 - RNA, 19 nt, Artificial Sequence
  Description of Artificial Sequence: Synthetic oligonucleotide
aauguaagucuuaaucauc

SEQ ID NO: 6910 - RNA, 19 nt, Artificial Sequence
  Description of Artificial Sequence: Synthetic oligonucleotide
aaauguaagucuuaaucau

SEQ ID NO: 6911 - RNA, 19 nt, Artificial Sequence
  Description of Artificial Sequence: Synthetic oligonucleotide
aaaauguaagucuuaauca

SEQ ID NO: 6912 - RNA, 19 nt, Artificial Sequence
  Description of Artificial Sequence: Synthetic oligonucleotide
gaaaauguaagucuuaauc

SEQ ID NO: 6913 - RNA, 19 nt, Artificial Sequence
  Description of Artificial Sequence: Synthetic oligonucleotide
agaaaauguaagucuuaau

SEQ ID NO: 6914 - RNA, 19 nt, Artificial Sequence
  Description of Artificial Sequence: Synthetic oligonucleotide
cagaaaauguaagucuuaa

SEQ ID NO: 6915 - RNA, 19 nt, Artificial Sequence
  Description of Artificial Sequence: Synthetic oligonucleotide
gcagaaaauguaagucuua

SEQ ID NO: 6916 - RNA, 19 nt, Artificial Sequence
  Description of Artificial Sequence: Synthetic oligonucleotide
ugcagaaaauguaagucuu

SEQ ID NO: 6917 - RNA, 19 nt, Artificial Sequence
  Description of Artificial Sequence: Synthetic oligonucleotide
gugcagaaaauguaagucu

SEQ ID NO: 6918 - RNA, 19 nt, Artificial Sequence
  Description of Artificial Sequence: Synthetic oligonucleotide
ugugcagaaaauguaaguc

SEQ ID NO: 6919 - RNA, 19 nt, Artificial Sequence
  Description of Artificial Sequence: Synthetic oligonucleotide
cugugcagaaaauguaagu

SEQ ID NO: 6920 - RNA, 19 nt, Artificial Sequence
  Description of Artificial Sequence: Synthetic oligonucleotide
ccugugcagaaaauguaag

SEQ ID NO: 6921 - RNA, 19 nt, Artificial Sequence
  Description of Artificial Sequence: Synthetic oligonucleotide
accugugcagaaaauguaa

SEQ ID NO: 6922 - RNA, 19 nt, Artificial Sequence
  Description of Artificial Sequence: Synthetic oligonucleotide
gaccugugcagaaaaugua

SEQ ID NO: 6923 - RNA, 19 nt, Artificial Sequence
  Description of Artificial Sequence: Synthetic oligonucleotide
agaccugugcagaaaaugu

SEQ ID NO: 6924 - RNA, 19 nt, Artificial Sequence
  Description of Artificial Sequence: Synthetic oligonucleotide
cagaccugugcagaaaaug

SEQ ID NO: 6925 - RNA, 19 nt, Artificial Sequence
  Description of Artificial Sequence: Synthetic oligonucleotide
gcagaccugugcagaaaau

SEQ ID NO: 6926 - RNA, 19 nt, Artificial Sequence
  Description of Artificial Sequence: Synthetic oligonucleotide
ugcagaccugugcagaaaa

SEQ ID NO: 6927 - RNA, 19 nt, Artificial Sequence
  Description of Artificial Sequence: Synthetic oligonucleotide
uugcagaccugugcagaaa

SEQ ID NO: 6928 - RNA, 19 nt, Artificial Sequence
  Description of Artificial Sequence: Synthetic oligonucleotide
uuugcagaccugugcagaa

SEQ ID NO: 6929 - RNA, 19 nt, Artificial Sequence
  Description of Artificial Sequence: Synthetic oligonucleotide
uuuugcagaccugugcaga

SEQ ID NO: 6930 - RNA, 19 nt, Artificial Sequence
  Description of Artificial Sequence: Synthetic oligonucleotide
uuuuugcagaccugugcag

SEQ ID NO: 6931 - RNA, 19 nt, Artificial Sequence
  Description of Artificial Sequence: Synthetic oligonucleotide
guuuuugcagaccugugca

SEQ ID NO: 6932 - RNA, 19 nt, Artificial Sequence
  Description of Artificial Sequence: Synthetic oligonucleotide
uguuuuugcagaccugugc

SEQ ID NO: 6933 - RNA, 19 nt, Artificial Sequence
  Description of Artificial Sequence: Synthetic oligonucleotide
uuguuuuugcagaccugug

SEQ ID NO: 6934 - RNA, 19 nt, Artificial Sequence
  Description of Artificial Sequence: Synthetic oligonucleotide
uuuguuuuugcagaccugu

SEQ ID NO: 6935 - RNA, 19 nt, Artificial Sequence
  Description of Artificial Sequence: Synthetic oligonucleotide
uuuuguuuuugcagaccug

SEQ ID NO: 6936 - RNA, 19 nt, Artificial Sequence
  Description of Artificial Sequence: Synthetic oligonucleotide
uuuuuguuuuugcagaccu

SEQ ID NO: 6937 - RNA, 19 nt, Artificial Sequence
  Description of Artificial Sequence: Synthetic oligonucleotide
auuuuuguuuuugcagacc

SEQ ID NO: 6938 - RNA, 19 nt, Artificial Sequence
  Description of Artificial Sequence: Synthetic oligonucleotide
aauuuuuguuuuugcagac

SEQ ID NO: 6939 - RNA, 19 nt, Artificial Sequence
  Description of Artificial Sequence: Synthetic oligonucleotide
uaauuuuuguuuuugcaga

SEQ ID NO: 6940 - RNA, 19 nt, Artificial Sequence
  Description of Artificial Sequence: Synthetic oligonucleotide
auaauuuuuguuuuugcag

SEQ ID NO: 6941 - RNA, 19 nt, Artificial Sequence
  Description of Artificial Sequence: Synthetic oligonucleotide
uauaauuuuuguuuuugca

SEQ ID NO: 6942 - RNA, 19 nt, Artificial Sequence
  Description of Artificial Sequence: Synthetic oligonucleotide
uuauaauuuuuguuuuugc

SEQ ID NO: 6943 - RNA, 19 nt, Artificial Sequence
  Description of Artificial Sequence: Synthetic oligonucleotide
uuuauaauuuuuguuuuug

SEQ ID NO: 6944 - RNA, 19 nt, Artificial Sequence
  Description of Artificial Sequence: Synthetic oligonucleotide
guuuauaauuuuuguuuuu

SEQ ID NO: 6945 - RNA, 19 nt, Artificial Sequence
  Description of Artificial Sequence: Synthetic oligonucleotide
aguuuauaauuuuuguuuu

SEQ ID NO: 6946 - RNA, 19 nt, Artificial Sequence
  Description of Artificial Sequence: Synthetic oligonucleotide
uaguuuauaauuuuuguuu

SEQ ID NO: 6947 - RNA, 19 nt, Artificial Sequence
  Description of Artificial Sequence: Synthetic oligonucleotide
cuaguuuauaauuuuuguu

SEQ ID NO: 6948 - RNA, 19 nt, Artificial Sequence
  Description of Artificial Sequence: Synthetic oligonucleotide
acuaguuuauaauuuuugu

SEQ ID NO: 6949 - RNA, 19 nt, Artificial Sequence
  Description of Artificial Sequence: Synthetic oligonucleotide
gacuaguuuauaauuuuug

SEQ ID NO: 6950 - RNA, 19 nt, Artificial Sequence
  Description of Artificial Sequence: Synthetic oligonucleotide
ggacuaguuuauaauuuuu

SEQ ID NO: 6951 - RNA, 19 nt, Artificial Sequence
  Description of Artificial Sequence: Synthetic oligonucleotide
uggacuaguuuauaauuuu

SEQ ID NO: 6952 - RNA, 19 nt, Artificial Sequence
  Description of Artificial Sequence: Synthetic oligonucleotide
auggacuaguuuauaauuu

SEQ ID NO: 6953 - RNA, 19 nt, Artificial Sequence
  Description of Artificial Sequence: Synthetic oligonucleotide
gauggacuaguuuauaauu

SEQ ID NO: 6954 - RNA, 19 nt, Artificial Sequence
  Description of Artificial Sequence: Synthetic oligonucleotide
ggauggacuaguuuauaau

SEQ ID NO: 6955 - RNA, 19 nt, Artificial Sequence
  Description of Artificial Sequence: Synthetic oligonucleotide
uggauggacuaguuuauaa

SEQ ID NO: 6956 - RNA, 19 nt, Artificial Sequence
  Description of Artificial Sequence: Synthetic oligonucleotide
uuggauggacuaguuuaua

SEQ ID NO: 6957 - RNA, 19 nt, Artificial Sequence
  Description of Artificial Sequence: Synthetic oligonucleotide
cuuggauggacuaguuuau

SEQ ID NO: 6958 - RNA, 19 nt, Artificial Sequence
  Description of Artificial Sequence: Synthetic oligonucleotide
ucuuggauggacuaguuua

SEQ ID NO: 6959 - RNA, 19 nt, Artificial Sequence
  Description of Artificial Sequence: Synthetic oligonucleotide
uucuuggauggacuaguuu

SEQ ID NO: 6960 - RNA, 19 nt, Artificial Sequence
  Description of Artificial Sequence: Synthetic oligonucleotide
guucuuggauggacuaguu

SEQ ID NO: 6961 - RNA, 19 nt, Artificial Sequence
  Description of Artificial Sequence: Synthetic oligonucleotide
gguucuuggauggacuagu

SEQ ID NO: 6962 - RNA, 19 nt, Artificial Sequence
  Description of Artificial Sequence: Synthetic oligonucleotide
ugguucuuggauggacuag

SEQ ID NO: 6963 - RNA, 19 nt, Artificial Sequence
  Description of Artificial Sequence: Synthetic oligonucleotide
uugguucuuggauggacua

SEQ ID NO: 6964 - RNA, 19 nt, Artificial Sequence
  Description of Artificial Sequence: Synthetic oligonucleotide
uuugguucuuggauggacu

SEQ ID NO: 6965 - RNA, 19 nt, Artificial Sequence
  Description of Artificial Sequence: Synthetic oligonucleotide
cuuugguucuuggauggac

SEQ ID NO: 6966 - RNA, 19 nt, Artificial Sequence
  Description of Artificial Sequence: Synthetic oligonucleotide
acuuugguucuuggaugga

SEQ ID NO: 6967 - RNA, 19 nt, Artificial Sequence
  Description of Artificial Sequence: Synthetic oligonucleotide
aacuuugguucuuggaugg

SEQ ID NO: 6968 - RNA, 19 nt, Artificial Sequence
  Description of Artificial Sequence: Synthetic oligonucleotide
aaacuuugguucuuggaug

SEQ ID NO: 6969 - RNA, 19 nt, Artificial Sequence
  Description of Artificial Sequence: Synthetic oligonucleotide
caaacuuugguucuuggau

SEQ ID NO: 6970 - RNA, 19 nt, Artificial Sequence
  Description of Artificial Sequence: Synthetic oligonucleotide
acaaacuuugguucuugga

SEQ ID NO: 6971 - RNA, 19 nt, Artificial Sequence
  Description of Artificial Sequence: Synthetic oligonucleotide
uacaaacuuugguucuugg

SEQ ID NO: 6972 - RNA, 19 nt, Artificial Sequence
  Description of Artificial Sequence: Synthetic oligonucleotide
auacaaacuuugguucuug

SEQ ID NO: 6973 - RNA, 19 nt, Artificial Sequence
  Description of Artificial Sequence: Synthetic oligonucleotide
uauacaaacuuugguucuu

SEQ ID NO: 6974 - RNA, 19 nt, Artificial Sequence
  Description of Artificial Sequence: Synthetic oligonucleotide
uuauacaaacuuugguucu

SEQ ID NO: 6975 - RNA, 19 nt, Artificial Sequence
  Description of Artificial Sequence: Synthetic oligonucleotide
uuuauacaaacuuugguuc

SEQ ID NO: 6976 - RNA, 19 nt, Artificial Sequence
  Description of Artificial Sequence: Synthetic oligonucleotide
guuuauacaaacuuugguu

SEQ ID NO: 6977 - RNA, 19 nt, Artificial Sequence
  Description of Artificial Sequence: Synthetic oligonucleotide
uguuuauacaaacuuuggu

SEQ ID NO: 6978 - RNA, 19 nt, Artificial Sequence
  Description of Artificial Sequence: Synthetic oligonucleotide
cuguuuauacaaacuuugg

SEQ ID NO: 6979 - RNA, 19 nt, Artificial Sequence
  Description of Artificial Sequence: Synthetic oligonucleotide
ccuguuuauacaaacuuug

SEQ ID NO: 6980 - RNA, 19 nt, Artificial Sequence
  Description of Artificial Sequence: Synthetic oligonucleotide
accuguuuauacaaacuuu

SEQ ID NO: 6981 - RNA, 19 nt, Artificial Sequence
  Description of Artificial Sequence: Synthetic oligonucleotide
aaccuguuuauacaaacuu

SEQ ID NO: 6982 - RNA, 19 nt, Artificial Sequence
  Description of Artificial Sequence: Synthetic oligonucleotide
caaccuguuuauacaaacu

SEQ ID NO: 6983 - RNA, 19 nt, Artificial Sequence
  Description of Artificial Sequence: Synthetic oligonucleotide
gcaaccuguuuauacaaac

SEQ ID NO: 6984 - RNA, 19 nt, Artificial Sequence
  Description of Artificial Sequence: Synthetic oligonucleotide
agcaaccuguuuauacaaa

SEQ ID NO: 6985 - RNA, 19 nt, Artificial Sequence
  Description of Artificial Sequence: Synthetic oligonucleotide
uagcaaccuguuuauacaa

SEQ ID NO: 6986 - RNA, 19 nt, Artificial Sequence
  Description of Artificial Sequence: Synthetic oligonucleotide
auagcaaccuguuuauaca

SEQ ID NO: 6987 - RNA, 19 nt, Artificial Sequence
  Description of Artificial Sequence: Synthetic oligonucleotide
uauagcaaccuguuuauac

SEQ ID NO: 6988 - RNA, 19 nt, Artificial Sequence
  Description of Artificial Sequence: Synthetic oligonucleotide
uuauagcaaccuguuuaua

SEQ ID NO: 6989 - RNA, 19 nt, Artificial Sequence
  Description of Artificial Sequence: Synthetic oligonucleotide
cuuauagcaaccuguuuau

SEQ ID NO: 6990 - RNA, 19 nt, Artificial Sequence
  Description of Artificial Sequence: Synthetic oligonucleotide
gcuuauagcaaccuguuua

SEQ ID NO: 6991 - RNA, 19 nt, Artificial Sequence
  Description of Artificial Sequence: Synthetic oligonucleotide
agcuuauagcaaccuguuu

SEQ ID NO: 6992 - RNA, 19 nt, Artificial Sequence
  Description of Artificial Sequence: Synthetic oligonucleotide
aagcuuauagcaaccuguu

SEQ ID NO: 6993 - RNA, 19 nt, Artificial Sequence
  Description of Artificial Sequence: Synthetic oligonucleotide
caagcuuauagcaaccugu

SEQ ID NO: 6994 - RNA, 19 nt, Artificial Sequence
  Description of Artificial Sequence: Synthetic oligonucleotide
ccaagcuuauagcaaccug

SEQ ID NO: 6995 - RNA, 19 nt, Artificial Sequence
  Description of Artificial Sequence: Synthetic oligonucleotide
accaagcuuauagcaaccu

SEQ ID NO: 6996 - RNA, 19 nt, Artificial Sequence
  Description of Artificial Sequence: Synthetic oligonucleotide
caccaagcuuauagcaacc

SEQ ID NO: 6997 - RNA, 19 nt, Artificial Sequence
  Description of Artificial Sequence: Synthetic oligonucleotide
ucaccaagcuuauagcaac

SEQ ID NO: 6998 - RNA, 19 nt, Artificial Sequence
  Description of Artificial Sequence: Synthetic oligonucleotide
uucaccaagcuuauagcaa

SEQ ID NO: 6999 - RNA, 19 nt, Artificial Sequence
  Description of Artificial Sequence: Synthetic oligonucleotide
uuucaccaagcuuauagca

SEQ ID NO: 7000 - RNA, 19 nt, Artificial Sequence
  Description of Artificial Sequence: Synthetic oligonucleotide
auuucaccaagcuuauagc

SEQ ID NO: 7001 - RNA, 19 nt, Artificial Sequence
  Description of Artificial Sequence: Synthetic oligonucleotide
cauuucaccaagcuuauag

SEQ ID NO: 7002 - RNA, 19 nt, Artificial Sequence
  Description of Artificial Sequence: Synthetic oligonucleotide
ucauuucaccaagcuuaua

SEQ ID NO: 7003 - RNA, 19 nt, Artificial Sequence
  Description of Artificial Sequence: Synthetic oligonucleotide
uucauuucaccaagcuuau

SEQ ID NO: 7004 - RNA, 19 nt, Artificial Sequence
  Description of Artificial Sequence: Synthetic oligonucleotide
uuucauuucaccaagcuua

SEQ ID NO: 7005 - RNA, 19 nt, Artificial Sequence
  Description of Artificial Sequence: Synthetic oligonucleotide
uuuucauuucaccaagcuu

SEQ ID NO: 7006 - RNA, 19 nt, Artificial Sequence
  Description of Artificial Sequence: Synthetic oligonucleotide
auuuucauuucaccaagcu

SEQ ID NO: 7007 - RNA, 19 nt, Artificial Sequence
  Description of Artificial Sequence: Synthetic oligonucleotide
cauuuucauuucaccaagc

SEQ ID NO: 7008 - RNA, 19 nt, Artificial Sequence
  Description of Artificial Sequence: Synthetic oligonucleotide
ccauuuucauuucaccaag

SEQ ID NO: 7009 - RNA, 19 nt, Artificial Sequence
  Description of Artificial Sequence: Synthetic oligonucleotide
uccauuuucauuucaccaa

SEQ ID NO: 7010 - RNA, 19 nt, Artificial Sequence
  Description of Artificial Sequence: Synthetic oligonucleotide
uuccauuuucauuucacca

SEQ ID NO: 7011 - RNA, 19 nt, Artificial Sequence
  Description of Artificial Sequence: Synthetic oligonucleotide
guuccauuuucauuucacc

SEQ ID NO: 7012 - RNA, 19 nt, Artificial Sequence
  Description of Artificial Sequence: Synthetic oligonucleotide
uguuccauuuucauuucac

SEQ ID NO: 7013 - RNA, 19 nt, Artificial Sequence
  Description of Artificial Sequence: Synthetic oligonucleotide
auguuccauuuucauuuca

SEQ ID NO: 7014 - RNA, 19 nt, Artificial Sequence
  Description of Artificial Sequence: Synthetic oligonucleotide
aauguuccauuuucauuuc

SEQ ID NO: 7015 - RNA, 19 nt, Artificial Sequence
  Description of Artificial Sequence: Synthetic oligonucleotide
aaauguuccauuuucauuu

SEQ ID NO: 7016 - RNA, 19 nt, Artificial Sequence
  Description of Artificial Sequence: Synthetic oligonucleotide
gaaauguuccauuuucauu

SEQ ID NO: 7017 - RNA, 19 nt, Artificial Sequence
  Description of Artificial Sequence: Synthetic oligonucleotide
ugaaauguuccauuuucau

SEQ ID NO: 7018 - RNA, 19 nt, Artificial Sequence
  Description of Artificial Sequence: Synthetic oligonucleotide
uugaaauguuccauuuuca

SEQ ID NO: 7019 - RNA, 19 nt, Artificial Sequence
  Description of Artificial Sequence: Synthetic oligonucleotide
auugaaauguuccauuuuc

SEQ ID NO: 7020 - RNA, 19 nt, Artificial Sequence
  Description of Artificial Sequence: Synthetic oligonucleotide
gauugaaauguuccauuuu

SEQ ID NO: 7021 - RNA, 19 nt, Artificial Sequence
  Description of Artificial Sequence: Synthetic oligonucleotide
ugauugaaauguuccauuu

SEQ ID NO: 7022 - RNA, 19 nt, Artificial Sequence
  Description of Artificial Sequence: Synthetic oligonucleotide
uugauugaaauguuccauu

SEQ ID NO: 7023 - RNA, 19 nt, Artificial Sequence
  Description of Artificial Sequence: Synthetic oligonucleotide
uuugauugaaauguuccau

SEQ ID NO: 7024 - RNA, 19 nt, Artificial Sequence
  Description of Artificial Sequence: Synthetic oligonucleotide
guuugauugaaauguucca

SEQ ID NO: 7025 - RNA, 19 nt, Artificial Sequence
  Description of Artificial Sequence: Synthetic oligonucleotide
uguuugauugaaauguucc

SEQ ID NO: 7026 - RNA, 19 nt, Artificial Sequence
  Description of Artificial Sequence: Synthetic oligonucleotide
auguuugauugaaauguuc

SEQ ID NO: 7027 - RNA, 19 nt, Artificial Sequence
  Description of Artificial Sequence: Synthetic oligonucleotide
aauguuugauugaaauguu

SEQ ID NO: 7028 - RNA, 19 nt, Artificial Sequence
  Description of Artificial Sequence: Synthetic oligonucleotide
aaauguuugauugaaaugu

SEQ ID NO: 7029 - RNA, 19 nt, Artificial Sequence
  Description of Artificial Sequence: Synthetic oligonucleotide
gaaauguuugauugaaaug

SEQ ID NO: 7030 - RNA, 19 nt, Artificial Sequence
  Description of Artificial Sequence: Synthetic oligonucleotide
ggaaauguuugauugaaau

SEQ ID NO: 7031 - RNA, 19 nt, Artificial Sequence
  Description of Artificial Sequence: Synthetic oligonucleotide
aggaaauguuugauugaaa

SEQ ID NO: 7032 - RNA, 19 nt, Artificial Sequence
  Description of Artificial Sequence: Synthetic oligonucleotide
uaggaaauguuugauugaa

SEQ ID NO: 7033 - RNA, 19 nt, Artificial Sequence
  Description of Artificial Sequence: Synthetic oligonucleotide
auaggaaauguuugauuga

SEQ ID NO: 7034 - RNA, 19 nt, Artificial Sequence
  Description of Artificial Sequence: Synthetic oligonucleotide
uauaggaaauguuugauug

SEQ ID NO: 7035 - RNA, 19 nt, Artificial Sequence
  Description of Artificial Sequence: Synthetic oligonucleotide
auauaggaaauguuugauu

SEQ ID NO: 7036 - RNA, 19 nt, Artificial Sequence
  Description of Artificial Sequence: Synthetic oligonucleotide
uauauaggaaauguuugau

SEQ ID NO: 7037 - RNA, 19 nt, Artificial Sequence
  Description of Artificial Sequence: Synthetic oligonucleotide
uuauauaggaaauguuuga

SEQ ID NO: 7038 - RNA, 19 nt, Artificial Sequence
  Description of Artificial Sequence: Synthetic oligonucleotide
guuauauaggaaauguuug

SEQ ID NO: 7039 - RNA, 19 nt, Artificial Sequence
  Description of Artificial Sequence: Synthetic oligonucleotide
uguuauauaggaaauguuu

SEQ ID NO: 7040 - RNA, 19 nt, Artificial Sequence
  Description of Artificial Sequence: Synthetic oligonucleotide
uuguuauauaggaaauguu

SEQ ID NO: 7041 - RNA, 19 nt, Artificial Sequence
  Description of Artificial Sequence: Synthetic oligonucleotide
auuguuauauaggaaaugu

SEQ ID NO: 7042 - RNA, 19 nt, Artificial Sequence
  Description of Artificial Sequence: Synthetic oligonucleotide
aauuguuauauaggaaaug

SEQ ID NO: 7043 - RNA, 19 nt, Artificial Sequence
  Description of Artificial Sequence: Synthetic oligonucleotide
uaauuguuauauaggaaau

SEQ ID NO: 7044 - RNA, 19 nt, Artificial Sequence
  Description of Artificial Sequence: Synthetic oligonucleotide
auaauuguuauauaggaaa

SEQ ID NO: 7045 - RNA, 19 nt, Artificial Sequence
  Description of Artificial Sequence: Synthetic oligonucleotide
aauaauuguuauauaggaa

SEQ ID NO: 7046 - RNA, 19 nt, Artificial Sequence
  Description of Artificial Sequence: Synthetic oligonucleotide
uaauaauuguuauauagga

SEQ ID NO: 7047 - RNA, 19 nt, Artificial Sequence
  Description of Artificial Sequence: Synthetic oligonucleotide
auaauaauuguuauauagg

SEQ ID NO: 7048 - RNA, 19 nt, Artificial Sequence
  Description of Artificial Sequence: Synthetic oligonucleotide
uauaauaauuguuauauag

SEQ ID NO: 7049 - RNA, 19 nt, Artificial Sequence
  Description of Artificial Sequence: Synthetic oligonucleotide
auauaauaauuguuauaua

SEQ ID NO: 7050 - RNA, 19 nt, Artificial Sequence
  Description of Artificial Sequence: Synthetic oligonucleotide
aauauaauaauuguuauau

SEQ ID NO: 7051 - RNA, 19 nt, Artificial Sequence
  Description of Artificial Sequence: Synthetic oligonucleotide
aaauauaauaauuguuaua

SEQ ID NO: 7052 - RNA, 19 nt, Artificial Sequence
  Description of Artificial Sequence: Synthetic oligonucleotide
uaaauauaauaauuguuau

SEQ ID NO: 7053 - RNA, 19 nt, Artificial Sequence
  Description of Artificial Sequence: Synthetic oligonucleotide
guaaauauaauaauuguua

SEQ ID NO: 7054 - RNA, 19 nt, Artificial Sequence
  Description of Artificial Sequence: Synthetic oligonucleotide
uguaaauauaauaauuguu

SEQ ID NO: 7055 - RNA, 19 nt, Artificial Sequence
  Description of Artificial Sequence: Synthetic oligonucleotide
uuguaaauauaauaauugu

SEQ ID NO: 7056 - RNA, 19 nt, Artificial Sequence
  Description of Artificial Sequence: Synthetic oligonucleotide
auuguaaauauaauaauug

SEQ ID NO: 7057 - RNA, 19 nt, Artificial Sequence
  Description of Artificial Sequence: Synthetic oligonucleotide
aauuguaaauauaauaauu

SEQ ID NO: 7058 - RNA, 19 nt, Artificial Sequence
  Description of Artificial Sequence: Synthetic oligonucleotide
aaauuguaaauauaauaau

SEQ ID NO: 7059 - RNA, 19 nt, Artificial Sequence
  Description of Artificial Sequence: Synthetic oligonucleotide
caaauuguaaauauaauaa

SEQ ID NO: 7060 - RNA, 19 nt, Artificial Sequence
  Description of Artificial Sequence: Synthetic oligonucleotide
ccaaauuguaaauauaaua

SEQ ID NO: 7061 - RNA, 19 nt, Artificial Sequence
  Description of Artificial Sequence: Synthetic oligonucleotide
accaaauuguaaauauaau

SEQ ID NO: 7062 - RNA, 19 nt, Artificial Sequence
  Description of Artificial Sequence: Synthetic oligonucleotide
aaccaaauuguaaauauaa

SEQ ID NO: 7063 - RNA, 19 nt, Artificial Sequence
  Description of Artificial Sequence: Synthetic oligonucleotide
aaaccaaauuguaaauaua

SEQ ID NO: 7064 - RNA, 19 nt, Artificial Sequence
  Description of Artificial Sequence: Synthetic oligonucleotide
gaaaccaaauuguaaauau

SEQ ID NO: 7065 - RNA, 19 nt, Artificial Sequence
  Description of Artificial Sequence: Synthetic oligonucleotide
agaaaccaaauuguaaaua

SEQ ID NO: 7066 - RNA, 19 nt, Artificial Sequence
  Description of Artificial Sequence: Synthetic oligonucleotide
cagaaaccaaauuguaaau

SEQ ID NO: 7067 - RNA, 19 nt, Artificial Sequence
  Description of Artificial Sequence: Synthetic oligonucleotide
gcagaaaccaaauuguaaa

SEQ ID NO: 7068 - RNA, 19 nt, Artificial Sequence
  Description of Artificial Sequence: Synthetic oligonucleotide
ugcagaaaccaaauuguaa

SEQ ID NO: 7069 - RNA, 19 nt, Artificial Sequence
  Description of Artificial Sequence: Synthetic oligonucleotide
uugcagaaaccaaauugua

SEQ ID NO: 7070 - RNA, 19 nt, Artificial Sequence
  Description of Artificial Sequence: Synthetic oligonucleotide
auugcagaaaccaaauugu

SEQ ID NO: 7071 - RNA, 19 nt, Artificial Sequence
  Description of Artificial Sequence: Synthetic oligonucleotide
uauugcagaaaccaaauug

SEQ ID NO: 7072 - RNA, 19 nt, Artificial Sequence
  Description of Artificial Sequence: Synthetic oligonucleotide
auauugcagaaaccaaauu

SEQ ID NO: 7073 - RNA, 19 nt, Artificial Sequence
  Description of Artificial Sequence: Synthetic oligonucleotide
aauauugcagaaaccaaau

SEQ ID NO: 7074 - RNA, 19 nt, Artificial Sequence
  Description of Artificial Sequence: Synthetic oligonucleotide
aaauauugcagaaaccaaa

SEQ ID NO: 7075 - RNA, 19 nt, Artificial Sequence
  Description of Artificial Sequence: Synthetic oligonucleotide
aaaauauugcagaaaccaa

SEQ ID NO: 7076 - RNA, 19 nt, Artificial Sequence
  Description of Artificial Sequence: Synthetic oligonucleotide
aaaaauauugcagaaacca

SEQ ID NO: 7077 - RNA, 19 nt, Artificial Sequence
  Description of Artificial Sequence: Synthetic oligonucleotide
gaaaaauauugcagaaacc

SEQ ID NO: 7078 - RNA, 19 nt, Artificial Sequence
  Description of Artificial Sequence: Synthetic oligonucleotide
agaaaaauauugcagaaac

SEQ ID NO: 7079 - RNA, 19 nt, Artificial Sequence
  Description of Artificial Sequence: Synthetic oligonucleotide
aagaaaaauauugcagaaa

SEQ ID NO: 7080 - RNA, 19 nt, Artificial Sequence
  Description of Artificial Sequence: Synthetic oligonucleotide
uaagaaaaauauugcagaa

SEQ ID NO: 7081 - RNA, 19 nt, Artificial Sequence
  Description of Artificial Sequence: Synthetic oligonucleotide
auaagaaaaauauugcaga

SEQ ID NO: 7082 - RNA, 19 nt, Artificial Sequence
  Description of Artificial Sequence: Synthetic oligonucleotide
cauaagaaaaauauugcag

SEQ ID NO: 7083 - RNA, 19 nt, Artificial Sequence
  Description of Artificial Sequence: Synthetic oligonucleotide
acauaagaaaaauauugca

SEQ ID NO: 7084 - RNA, 19 nt, Artificial Sequence
  Description of Artificial Sequence: Synthetic oligonucleotide
gacauaagaaaaauauugc

SEQ ID NO: 7085 - RNA, 19 nt, Artificial Sequence
  Description of Artificial Sequence: Synthetic oligonucleotide
ggacauaagaaaaauauug

SEQ ID NO: 7086 - RNA, 19 nt, Artificial Sequence
  Description of Artificial Sequence: Synthetic oligonucleotide
uggacauaagaaaaauauu

SEQ ID NO: 7087 - RNA, 19 nt, Artificial Sequence
  Description of Artificial Sequence: Synthetic oligonucleotide
guggacauaagaaaaauau

SEQ ID NO: 7088 - RNA, 19 nt, Artificial Sequence
  Description of Artificial Sequence: Synthetic oligonucleotide
gguggacauaagaaaaaua

SEQ ID NO: 7089 - RNA, 19 nt, Artificial Sequence
  Description of Artificial Sequence: Synthetic oligonucleotide
ggguggacauaagaaaaau

SEQ ID NO: 7090 - RNA, 19 nt, Artificial Sequence
  Description of Artificial Sequence: Synthetic oligonucleotide
aggguggacauaagaaaaa

SEQ ID NO: 7091 - RNA, 19 nt, Artificial Sequence
  Description of Artificial Sequence: Synthetic oligonucleotide
aaggguggacauaagaaaa

SEQ ID NO: 7092 - RNA, 19 nt, Artificial Sequence
  Description of Artificial Sequence: Synthetic oligonucleotide
aaaggguggacauaagaaa

SEQ ID NO: 7093 - RNA, 19 nt, Artificial Sequence
  Description of Artificial Sequence: Synthetic oligonucleotide
aaaaggguggacauaagaa

SEQ ID NO: 7094 - RNA, 19 nt, Artificial Sequence
  Description of Artificial Sequence: Synthetic oligonucleotide
uaaaaggguggacauaaga

SEQ ID NO: 7095 - RNA, 19 nt, Artificial Sequence
  Description of Artificial Sequence: Synthetic oligonucleotide
uuaaaaggguggacauaag

SEQ ID NO: 7096 - RNA, 19 nt, Artificial Sequence
  Description of Artificial Sequence: Synthetic oligonucleotide
uuuaaaaggguggacauaa

SEQ ID NO: 7097 - RNA, 19 nt, Artificial Sequence
  Description of Artificial Sequence: Synthetic oligonucleotide
uuuuaaaaggguggacaua

SEQ ID NO: 7098 - RNA, 19 nt, Artificial Sequence
  Description of Artificial Sequence: Synthetic oligonucleotide
uuuuuaaaaggguggacau

SEQ ID NO: 7099 - RNA, 19 nt, Artificial Sequence
  Description of Artificial Sequence: Synthetic oligonucleotide
auuuuuaaaaggguggaca

SEQ ID NO: 7100 - RNA, 19 nt, Artificial Sequence
  Description of Artificial Sequence: Synthetic oligonucleotide
aauuuuuaaaaggguggac

SEQ ID NO: 7101 - RNA, 19 nt, Artificial Sequence
  Description of Artificial Sequence: Synthetic oligonucleotide
uaauuuuuaaaagggugga

SEQ ID NO: 7102 - RNA, 19 nt, Artificial Sequence
  Description of Artificial Sequence: Synthetic oligonucleotide
auaauuuuuaaaagggugg

SEQ ID NO: 7103 - RNA, 19 nt, Artificial Sequence
  Description of Artificial Sequence: Synthetic oligonucleotide
aauaauuuuuaaaagggug

SEQ ID NO: 7104 - RNA, 19 nt, Artificial Sequence
  Description of Artificial Sequence: Synthetic oligonucleotide
uaauaauuuuuaaaagggu

SEQ ID NO: 7105 - RNA, 19 nt, Artificial Sequence
  Description of Artificial Sequence: Synthetic oligonucleotide
auaauaauuuuuaaaaggg

SEQ ID NO: 7106 - RNA, 19 nt, Artificial Sequence
  Description of Artificial Sequence: Synthetic oligonucleotide
aauaauaauuuuuaaaagg

SEQ ID NO: 7107 - RNA, 19 nt, Artificial Sequence
  Description of Artificial Sequence: Synthetic oligonucleotide
aaauaauaauuuuuaaaag

SEQ ID NO: 7108 - RNA, 19 nt, Artificial Sequence
  Description of Artificial Sequence: Synthetic oligonucleotide
caaauaauaauuuuuaaaa

SEQ ID NO: 7109 - RNA, 19 nt, Artificial Sequence
  Description of Artificial Sequence: Synthetic oligonucleotide
ucaaauaauaauuuuuaaa

SEQ ID NO: 7110 - RNA, 19 nt, Artificial Sequence
  Description of Artificial Sequence: Synthetic oligonucleotide
uucaaauaauaauuuuuaa

SEQ ID NO: 7111 - RNA, 19 nt, Artificial Sequence
  Description of Artificial Sequence: Synthetic oligonucleotide
cuucaaauaauaauuuuua

SEQ ID NO: 7112 - RNA, 19 nt, Artificial Sequence
  Description of Artificial Sequence: Synthetic oligonucleotide
acuucaaauaauaauuuuu

SEQ ID NO: 7113 - RNA, 19 nt, Artificial Sequence
  Description of Artificial Sequence: Synthetic oligonucleotide
uacuucaaauaauaauuuu

SEQ ID NO: 7114 - RNA, 19 nt, Artificial Sequence
  Description of Artificial Sequence: Synthetic oligonucleotide
uuacuucaaauaauaauuu

SEQ ID NO: 7115 - RNA, 19 nt, Artificial Sequence
  Description of Artificial Sequence: Synthetic oligonucleotide
auuacuucaaauaauaauu

SEQ ID NO: 7116 - RNA, 19 nt, Artificial Sequence
  Description of Artificial Sequence: Synthetic oligonucleotide
aauuacuucaaauaauaau

SEQ ID NO: 7117 - RNA, 19 nt, Artificial Sequence
  Description of Artificial Sequence: Synthetic oligonucleotide
aaauuacuucaaauaauaa

SEQ ID NO: 7118 - RNA, 19 nt, Artificial Sequence
  Description of Artificial Sequence: Synthetic oligonucleotide
uaaauuacuucaaauaaua

SEQ ID NO: 7119 - RNA, 19 nt, Artificial Sequence
  Description of Artificial Sequence: Synthetic oligonucleotide
auaaauuacuucaaauaau

SEQ ID NO: 7120 - RNA, 19 nt, Artificial Sequence
  Description of Artificial Sequence: Synthetic oligonucleotide
aauaaauuacuucaaauaa

SEQ ID NO: 7121 - RNA, 19 nt, Artificial Sequence
  Description of Artificial Sequence: Synthetic oligonucleotide
aaauaaauuacuucaaaua

SEQ ID NO: 7122 - RNA, 19 nt, Artificial Sequence
  Description of Artificial Sequence: Synthetic oligonucleotide
uaaauaaauuacuucaaau

SEQ ID NO: 7123 - RNA, 19 nt, Artificial Sequence
  Description of Artificial Sequence: Synthetic oligonucleotide
guaaauaaauuacuucaaa

SEQ ID NO: 7124 - RNA, 19 nt, Artificial Sequence
  Description of Artificial Sequence: Synthetic oligonucleotide
uguaaauaaauuacuucaa

SEQ ID NO: 7125 - RNA, 19 nt, Artificial Sequence
  Description of Artificial Sequence: Synthetic oligonucleotide
cuguaaauaaauuacuuca

SEQ ID NO: 7126 - RNA, 19 nt, Artificial Sequence
  Description of Artificial Sequence: Synthetic oligonucleotide
ccuguaaauaaauuacuuc

SEQ ID NO: 7127 - RNA, 19 nt, Artificial Sequence
  Description of Artificial Sequence: Synthetic oligonucleotide
uccuguaaauaaauuacuu

SEQ ID NO: 7128 - RNA, 19 nt, Artificial Sequence
  Description of Artificial Sequence: Synthetic oligonucleotide
uuccuguaaauaaauuacu

SEQ ID NO: 7129 - RNA, 19 nt, Artificial Sequence
  Description of Artificial Sequence: Synthetic oligonucleotide
uuuccuguaaauaaauuac

SEQ ID NO: 7130 - RNA, 19 nt, Artificial Sequence
  Description of Artificial Sequence: Synthetic oligonucleotide
auuuccuguaaauaaauua

SEQ ID NO: 7131 - RNA, 19 nt, Artificial Sequence
  Description of Artificial Sequence: Synthetic oligonucleotide
cauuuccuguaaauaaauu

SEQ ID NO: 7132 - RNA, 19 nt, Artificial Sequence
  Description of Artificial Sequence: Synthetic oligonucleotide
acauuuccuguaaauaaau

SEQ ID NO: 7133 - RNA, 19 nt, Artificial Sequence
  Description of Artificial Sequence: Synthetic oligonucleotide
aacauuuccuguaaauaaa

SEQ ID NO: 7134 - RNA, 19 nt, Artificial Sequence
  Description of Artificial Sequence: Synthetic oligonucleotide
uaacauuuccuguaaauaa

SEQ ID NO: 7135 - RNA, 19 nt, Artificial Sequence
  Description of Artificial Sequence: Synthetic oligonucleotide
uuaacauuuccuguaaaua

SEQ ID NO: 7136 - RNA, 19 nt, Artificial Sequence
  Description of Artificial Sequence: Synthetic oligonucleotide
auuaacauuuccuguaaau

SEQ ID NO: 7137 - RNA, 19 nt, Artificial Sequence
  Description of Artificial Sequence: Synthetic oligonucleotide
cauuaacauuuccuguaaa

SEQ ID NO: 7138 - RNA, 19 nt, Artificial Sequence
  Description of Artificial Sequence: Synthetic oligonucleotide
ucauuaacauuuccuguaa

SEQ ID NO: 7139 - RNA, 19 nt, Artificial Sequence
  Description of Artificial Sequence: Synthetic oligonucleotide
cucauuaacauuuccugua

SEQ ID NO: 7140 - RNA, 19 nt, Artificial Sequence
  Description of Artificial Sequence: Synthetic oligonucleotide
ucucauuaacauuuccugu

SEQ ID NO: 7141 - RNA, 19 nt, Artificial Sequence
  Description of Artificial Sequence: Synthetic oligonucleotide
aucucauuaacauuuccug

SEQ ID NO: 7142 - RNA, 19 nt, Artificial Sequence
  Description of Artificial Sequence: Synthetic oligonucleotide
caucucauuaacauuuccu

SEQ ID NO: 7143 - RNA, 19 nt, Artificial Sequence
  Description of Artificial Sequence: Synthetic oligonucleotide
acaucucauuaacauuucc

SEQ ID NO: 7144 - RNA, 19 nt, Artificial Sequence
  Description of Artificial Sequence: Synthetic oligonucleotide
uacaucucauuaacauuuc

SEQ ID NO: 7145 - RNA, 19 nt, Artificial Sequence
  Description of Artificial Sequence: Synthetic oligonucleotide
auacaucucauuaacauuu

SEQ ID NO: 7146 - RNA, 19 nt, Artificial Sequence
  Description of Artificial Sequence: Synthetic oligonucleotide
aauacaucucauuaacauu

SEQ ID NO: 7147 - RNA, 19 nt, Artificial Sequence
  Description of Artificial Sequence: Synthetic oligonucleotide
aaauacaucucauuaacau

SEQ ID NO: 7148 - RNA, 19 nt, Artificial Sequence
  Description of Artificial Sequence: Synthetic oligonucleotide
aaaauacaucucauuaaca

SEQ ID NO: 7149 - RNA, 19 nt, Artificial Sequence
  Description of Artificial Sequence: Synthetic oligonucleotide
gaaaauacaucucauuaac

SEQ ID NO: 7150 - RNA, 19 nt, Artificial Sequence
  Description of Artificial Sequence: Synthetic oligonucleotide
agaaaauacaucucauuaa

SEQ ID NO: 7151 - RNA, 19 nt, Artificial Sequence
  Description of Artificial Sequence: Synthetic oligonucleotide
aagaaaauacaucucauua

SEQ ID NO: 7152 - RNA, 19 nt, Artificial Sequence
  Description of Artificial Sequence: Synthetic oligonucleotide
uaagaaaauacaucucauu

SEQ ID NO: 7153 - RNA, 19 nt, Artificial Sequence
  Description of Artificial Sequence: Synthetic oligonucleotide
auaagaaaauacaucucau

SEQ ID NO: 7154 - RNA, 19 nt, Artificial Sequence
  Description of Artificial Sequence: Synthetic oligonucleotide
uauaagaaaauacaucuca

SEQ ID NO: 7155 - RNA, 19 nt, Artificial Sequence
  Description of Artificial Sequence: Synthetic oligonucleotide
cuauaagaaaauacaucuc

SEQ ID NO: 7156 - RNA, 19 nt, Artificial Sequence
  Description of Artificial Sequence: Synthetic oligonucleotide
ucuauaagaaaauacaucu

SEQ ID NO: 7157 - RNA, 19 nt, Artificial Sequence
  Description of Artificial Sequence: Synthetic oligonucleotide
cucuauaagaaaauacauc

SEQ ID NO: 7158 - RNA, 19 nt, Artificial Sequence
  Description of Artificial Sequence: Synthetic oligonucleotide
ucucuauaagaaaauacau

SEQ ID NO: 7159 - RNA, 19 nt, Artificial Sequence
  Description of Artificial Sequence: Synthetic oligonucleotide
aucucuauaagaaaauaca

SEQ ID NO: 7160 - RNA, 19 nt, Artificial Sequence
  Description of Artificial Sequence: Synthetic oligonucleotide
uaucucuauaagaaaauac

SEQ ID NO: 7161 - RNA, 19 nt, Artificial Sequence
  Description of Artificial Sequence: Synthetic oligonucleotide
auaucucuauaagaaaaua

SEQ ID NO: 7162 - RNA, 19 nt, Artificial Sequence
  Description of Artificial Sequence: Synthetic oligonucleotide
aauaucucuauaagaaaau

SEQ ID NO: 7163 - RNA, 19 nt, Artificial Sequence
  Description of Artificial Sequence: Synthetic oligonucleotide
aaauaucucuauaagaaaa

SEQ ID NO: 7164 - RNA, 19 nt, Artificial Sequence
  Description of Artificial Sequence: Synthetic oligonucleotide
gaaauaucucuauaagaaa

SEQ ID NO: 7165 - RNA, 19 nt, Artificial Sequence
  Description of Artificial Sequence: Synthetic oligonucleotide
agaaauaucucuauaagaa

SEQ ID NO: 7166 - RNA, 19 nt, Artificial Sequence
  Description of Artificial Sequence: Synthetic oligonucleotide
aagaaauaucucuauaaga

SEQ ID NO: 7167 - RNA, 19 nt, Artificial Sequence
  Description of Artificial Sequence: Synthetic oligonucleotide
uaagaaauaucucuauaag

SEQ ID NO: 7168 - RNA, 19 nt, Artificial Sequence
  Description of Artificial Sequence: Synthetic oligonucleotide
guaagaaauaucucuauaa

SEQ ID NO: 7169 - RNA, 19 nt, Artificial Sequence
  Description of Artificial Sequence: Synthetic oligonucleotide
uguaagaaauaucucuaua

SEQ ID NO: 7170 - RNA, 19 nt, Artificial Sequence
  Description of Artificial Sequence: Synthetic oligonucleotide
cuguaagaaauaucucuau

SEQ ID NO: 7171 - RNA, 19 nt, Artificial Sequence
  Description of Artificial Sequence: Synthetic oligonucleotide
ucuguaagaaauaucucua

SEQ ID NO: 7172 - RNA, 19 nt, Artificial Sequence
  Description of Artificial Sequence: Synthetic oligonucleotide
uucuguaagaaauaucucu

SEQ ID NO: 7173 - RNA, 19 nt, Artificial Sequence
  Description of Artificial Sequence: Synthetic oligonucleotide
uuucuguaagaaauaucuc

SEQ ID NO: 7174 - RNA, 19 nt, Artificial Sequence
  Description of Artificial Sequence: Synthetic oligonucleotide
cuuucuguaagaaauaucu

SEQ ID NO: 7175 - RNA, 19 nt, Artificial Sequence
  Description of Artificial Sequence: Synthetic oligonucleotide
gcuuucuguaagaaauauc

SEQ ID NO: 7176 - RNA, 19 nt, Artificial Sequence
  Description of Artificial Sequence: Synthetic oligonucleotide
agcuuucuguaagaaauau

SEQ ID NO: 7177 - RNA, 19 nt, Artificial Sequence
  Description of Artificial Sequence: Synthetic oligonucleotide
aagcuuucuguaagaaaua

SEQ ID NO: 7178 - RNA, 19 nt, Artificial Sequence
  Description of Artificial Sequence: Synthetic oligonucleotide
aaagcuuucuguaagaaau

SEQ ID NO: 7179 - RNA, 19 nt, Artificial Sequence
  Description of Artificial Sequence: Synthetic oligonucleotide
caaagcuuucuguaagaaa

SEQ ID NO: 7180 - RNA, 19 nt, Artificial Sequence
  Description of Artificial Sequence: Synthetic oligonucleotide
acaaagcuuucuguaagaa

SEQ ID NO: 7181 - RNA, 19 nt, Artificial Sequence
  Description of Artificial Sequence: Synthetic oligonucleotide
uacaaagcuuucuguaaga

SEQ ID NO: 7182 - RNA, 19 nt, Artificial Sequence
  Description of Artificial Sequence: Synthetic oligonucleotide
cuacaaagcuuucuguaag

SEQ ID NO: 7183 - RNA, 19 nt, Artificial Sequence
  Description of Artificial Sequence: Synthetic oligonucleotide
gcuacaaagcuuucuguaa

SEQ ID NO: 7184 - RNA, 19 nt, Artificial Sequence
  Description of Artificial Sequence: Synthetic oligonucleotide
ugcuacaaagcuuucugua

SEQ ID NO: 7185 - RNA, 19 nt, Artificial Sequence
  Description of Artificial Sequence: Synthetic oligonucleotide
cugcuacaaagcuuucugu

SEQ ID NO: 7186 - RNA, 19 nt, Artificial Sequence
  Description of Artificial Sequence: Synthetic oligonucleotide
ucugcuacaaagcuuucug

SEQ ID NO: 7187 - RNA, 19 nt, Artificial Sequence
  Description of Artificial Sequence: Synthetic oligonucleotide
uucugcuacaaagcuuucu

SEQ ID NO: 7188 - RNA, 19 nt, Artificial Sequence
  Description of Artificial Sequence: Synthetic oligonucleotide
auucugcuacaaagcuuuc

SEQ ID NO: 7189 - RNA, 19 nt, Artificial Sequence
  Description of Artificial Sequence: Synthetic oligonucleotide
uauucugcuacaaagcuuu

SEQ ID NO: 7190 - RNA, 19 nt, Artificial Sequence
  Description of Artificial Sequence: Synthetic oligonucleotide
auauucugcuacaaagcuu

SEQ ID NO: 7191 - RNA, 19 nt, Artificial Sequence
  Description of Artificial Sequence: Synthetic oligonucleotide
uauauucugcuacaaagcu

SEQ ID NO: 7192 - RNA, 19 nt, Artificial Sequence
  Description of Artificial Sequence: Synthetic oligonucleotide
auauauucugcuacaaagc

SEQ ID NO: 7193 - RNA, 19 nt, Artificial Sequence
  Description of Artificial Sequence: Synthetic oligonucleotide
aauauauucugcuacaaag

SEQ ID NO: 7194 - RNA, 19 nt, Artificial Sequence
  Description of Artificial Sequence: Synthetic oligonucleotide
aaauauauucugcuacaaa

SEQ ID NO: 7195 - RNA, 19 nt, Artificial Sequence
  Description of Artificial Sequence: Synthetic oligonucleotide
caaauauauucugcuacaa

SEQ ID NO: 7196 - RNA, 19 nt, Artificial Sequence
  Description of Artificial Sequence: Synthetic oligonucleotide
gcaaauauauucugcuaca

SEQ ID NO: 7197 - RNA, 19 nt, Artificial Sequence
  Description of Artificial Sequence: Synthetic oligonucleotide
ugcaaauauauucugcuac

SEQ ID NO: 7198 - RNA, 19 nt, Artificial Sequence
  Description of Artificial Sequence: Synthetic oligonucleotide
cugcaaauauauucugcua

SEQ ID NO: 7199 - RNA, 19 nt, Artificial Sequence
  Description of Artificial Sequence: Synthetic oligonucleotide
gcugcaaauauauucugcu

SEQ ID NO: 7200 - RNA, 19 nt, Artificial Sequence
  Description of Artificial Sequence: Synthetic oligonucleotide
agcugcaaauauauucugc

SEQ ID NO: 7201 - RNA, 19 nt, Artificial Sequence
  Description of Artificial Sequence: Synthetic oligonucleotide
uagcugcaaauauauucug

SEQ ID NO: 7202 - RNA, 19 nt, Artificial Sequence
  Description of Artificial Sequence: Synthetic oligonucleotide
auagcugcaaauauauucu

SEQ ID NO: 7203 - RNA, 19 nt, Artificial Sequence
  Description of Artificial Sequence: Synthetic oligonucleotide
aauagcugcaaauauauuc

SEQ ID NO: 7204 - RNA, 19 nt, Artificial Sequence
  Description of Artificial Sequence: Synthetic oligonucleotide
caauagcugcaaauauauu

SEQ ID NO: 7205 - RNA, 19 nt, Artificial Sequence
  Description of Artificial Sequence: Synthetic oligonucleotide
ucaauagcugcaaauauau

SEQ ID NO: 7206 - RNA, 19 nt, Artificial Sequence
  Description of Artificial Sequence: Synthetic oligonucleotide
gucaauagcugcaaauaua

SEQ ID NO: 7207 - RNA, 19 nt, Artificial Sequence
  Description of Artificial Sequence: Synthetic oligonucleotide
agucaauagcugcaaauau

SEQ ID NO: 7208 - RNA, 19 nt, Artificial Sequence
  Description of Artificial Sequence: Synthetic oligonucleotide
aagucaauagcugcaaaua

SEQ ID NO: 7209 - RNA, 19 nt, Artificial Sequence
  Description of Artificial Sequence: Synthetic oligonucleotide
aaagucaauagcugcaaau

SEQ ID NO: 7210 - RNA, 19 nt, Artificial Sequence
  Description of Artificial Sequence: Synthetic oligonucleotide
caaagucaauagcugcaaa

SEQ ID NO: 7211 - RNA, 19 nt, Artificial Sequence
  Description of Artificial Sequence: Synthetic oligonucleotide
acaaagucaauagcugcaa

SEQ ID NO: 7212 - RNA, 19 nt, Artificial Sequence
  Description of Artificial Sequence: Synthetic oligonucleotide
uacaaagucaauagcugca

SEQ ID NO: 7213 - RNA, 19 nt, Artificial Sequence
  Description of Artificial Sequence: Synthetic oligonucleotide
uuacaaagucaauagcugc

SEQ ID NO: 7214 - RNA, 19 nt, Artificial Sequence
  Description of Artificial Sequence: Synthetic oligonucleotide
auuacaaagucaauagcug

SEQ ID NO: 7215 - RNA, 19 nt, Artificial Sequence
  Description of Artificial Sequence: Synthetic oligonucleotide
aauuacaaagucaauagcu

SEQ ID NO: 7216 - RNA, 19 nt, Artificial Sequence
  Description of Artificial Sequence: Synthetic oligonucleotide
aaauuacaaagucaauagc

SEQ ID NO: 7217 - RNA, 19 nt, Artificial Sequence
  Description of Artificial Sequence: Synthetic oligonucleotide
uaaauuacaaagucaauag

SEQ ID NO: 7218 - RNA, 19 nt, Artificial Sequence
  Description of Artificial Sequence: Synthetic oligonucleotide
cuaaauuacaaagucaaua

SEQ ID NO: 7219 - RNA, 19 nt, Artificial Sequence
  Description of Artificial Sequence: Synthetic oligonucleotide
ccuaaauuacaaagucaau

SEQ ID NO: 7220 - RNA, 19 nt, Artificial Sequence
  Description of Artificial Sequence: Synthetic oligonucleotide
uccuaaauuacaaagucaa

SEQ ID NO: 7221 - RNA, 19 nt, Artificial Sequence
  Description of Artificial Sequence: Synthetic oligonucleotide
uuccuaaauuacaaaguca

SEQ ID NO: 7222 - RNA, 19 nt, Artificial Sequence
  Description of Artificial Sequence: Synthetic oligonucleotide
uuuccuaaauuacaaaguc

SEQ ID NO: 7223 - RNA, 19 nt, Artificial Sequence
  Description of Artificial Sequence: Synthetic oligonucleotide
uuuuccuaaauuacaaagu

SEQ ID NO: 7224 - RNA, 19 nt, Artificial Sequence
  Description of Artificial Sequence: Synthetic oligonucleotide
uuuuuccuaaauuacaaag

SEQ ID NO: 7225 - RNA, 19 nt, Artificial Sequence
  Description of Artificial Sequence: Synthetic oligonucleotide
auuuuuccuaaauuacaaa

SEQ ID NO: 7226 - RNA, 19 nt, Artificial Sequence
  Description of Artificial Sequence: Synthetic oligonucleotide
cauuuuuccuaaauuacaa

SEQ ID NO: 7227 - RNA, 19 nt, Artificial Sequence
  Description of Artificial Sequence: Synthetic oligonucleotide
acauuuuuccuaaauuaca

SEQ ID NO: 7228 - RNA, 19 nt, Artificial Sequence
  Description of Artificial Sequence: Synthetic oligonucleotide
uacauuuuuccuaaauuac

SEQ ID NO: 7229 - RNA, 19 nt, Artificial Sequence
  Description of Artificial Sequence: Synthetic oligonucleotide
auacauuuuuccuaaauua

SEQ ID NO: 7230 - RNA, 19 nt, Artificial Sequence
  Description of Artificial Sequence: Synthetic oligonucleotide
uauacauuuuuccuaaauu

SEQ ID NO: 7231 - RNA, 19 nt, Artificial Sequence
  Description of Artificial Sequence: Synthetic oligonucleotide
uuauacauuuuuccuaaau

SEQ ID NO: 7232 - RNA, 19 nt, Artificial Sequence
  Description of Artificial Sequence: Synthetic oligonucleotide
auuauacauuuuuccuaaa

SEQ ID NO: 7233 - RNA, 19 nt, Artificial Sequence
  Description of Artificial Sequence: Synthetic oligonucleotide
uauuauacauuuuuccuaa

SEQ ID NO: 7234 - RNA, 19 nt, Artificial Sequence
  Description of Artificial Sequence: Synthetic oligonucleotide
uuauuauacauuuuuccua

SEQ ID NO: 7235 - RNA, 19 nt, Artificial Sequence
  Description of Artificial Sequence: Synthetic oligonucleotide
cuuauuauacauuuuuccu

SEQ ID NO: 7236 - RNA, 19 nt, Artificial Sequence
  Description of Artificial Sequence: Synthetic oligonucleotide
ucuuauuauacauuuuucc

SEQ ID NO: 7237 - RNA, 19 nt, Artificial Sequence
  Description of Artificial Sequence: Synthetic oligonucleotide
aucuuauuauacauuuuuc

SEQ ID NO: 7238 - RNA, 19 nt, Artificial Sequence
  Description of Artificial Sequence: Synthetic oligonucleotide
uaucuuauuauacauuuuu

SEQ ID NO: 7239 - RNA, 19 nt, Artificial Sequence
  Description of Artificial Sequence: Synthetic oligonucleotide
uuaucuuauuauacauuuu

SEQ ID NO: 7240 - RNA, 19 nt, Artificial Sequence
  Description of Artificial Sequence: Synthetic oligonucleotide
uuuaucuuauuauacauuu

SEQ ID NO: 7241 - RNA, 19 nt, Artificial Sequence
  Description of Artificial Sequence: Synthetic oligonucleotide
uuuuaucuuauuauacauu

SEQ ID NO: 7242 - RNA, 19 nt, Artificial Sequence
  Description of Artificial Sequence: Synthetic oligonucleotide
auuuuaucuuauuauacau

SEQ ID NO: 7243 - RNA, 19 nt, Artificial Sequence
  Description of Artificial Sequence: Synthetic oligonucleotide
gauuuuaucuuauuauaca

SEQ ID NO: 7244 - RNA, 19 nt, Artificial Sequence
  Description of Artificial Sequence: Synthetic oligonucleotide
agauuuuaucuuauuauac

SEQ ID NO: 7245 - RNA, 19 nt, Artificial Sequence
  Description of Artificial Sequence: Synthetic oligonucleotide
uagauuuuaucuuauuaua

SEQ ID NO: 7246 - RNA, 19 nt, Artificial Sequence
  Description of Artificial Sequence: Synthetic oligonucleotide
auagauuuuaucuuauuau

SEQ ID NO: 7247 - RNA, 19 nt, Artificial Sequence
  Description of Artificial Sequence: Synthetic oligonucleotide
aauagauuuuaucuuauua

SEQ ID NO: 7248 - RNA, 19 nt, Artificial Sequence
  Description of Artificial Sequence: Synthetic oligonucleotide
uaauagauuuuaucuuauu

SEQ ID NO: 7249 - RNA, 19 nt, Artificial Sequence
  Description of Artificial Sequence: Synthetic oligonucleotide
uuaauagauuuuaucuuau

SEQ ID NO: 7250 - RNA, 19 nt, Artificial Sequence
  Description of Artificial Sequence: Synthetic oligonucleotide
uuuaauagauuuuaucuua

SEQ ID NO: 7251 - RNA, 19 nt, Artificial Sequence
  Description of Artificial Sequence: Synthetic oligonucleotide
auuuaauagauuuuaucuu

SEQ ID NO: 7252 - RNA, 19 nt, Artificial Sequence
  Description of Artificial Sequence: Synthetic oligonucleotide
aauuuaauagauuuuaucu

SEQ ID NO: 7253 - RNA, 19 nt, Artificial Sequence
  Description of Artificial Sequence: Synthetic oligonucleotide
aaauuuaauagauuuuauc

SEQ ID NO: 7254 - RNA, 19 nt, Artificial Sequence
  Description of Artificial Sequence: Synthetic oligonucleotide
aaaauuuaauagauuuuau

SEQ ID NO: 7255 - RNA, 19 nt, Artificial Sequence
  Description of Artificial Sequence: Synthetic oligonucleotide
aaaaauuuaauagauuuua

SEQ ID NO: 7256 - RNA, 19 nt, Artificial Sequence
  Description of Artificial Sequence: Synthetic oligonucleotide
gaaaaauuuaauagauuuu

SEQ ID NO: 7257 - RNA, 19 nt, Artificial Sequence
  Description of Artificial Sequence: Synthetic oligonucleotide
agaaaaauuuaauagauuu

SEQ ID NO: 7258 - RNA, 19 nt, Artificial Sequence
  Description of Artificial Sequence: Synthetic oligonucleotide
gagaaaaauuuaauagauu

SEQ ID NO: 7259 - RNA, 19 nt, Artificial Sequence
  Description of Artificial Sequence: Synthetic oligonucleotide
ggagaaaaauuuaauagau

SEQ ID NO: 7260 - RNA, 19 nt, Artificial Sequence
  Description of Artificial Sequence: Synthetic oligonucleotide
aggagaaaaauuuaauaga

SEQ ID NO: 7261 - RNA, 19 nt, Artificial Sequence
  Description of Artificial Sequence: Synthetic oligonucleotide
gaggagaaaaauuuaauag

SEQ ID NO: 7262 - RNA, 19 nt, Artificial Sequence
  Description of Artificial Sequence: Synthetic oligonucleotide
agaggagaaaaauuuaaua

SEQ ID NO: 7263 - RNA, 19 nt, Artificial Sequence
  Description of Artificial Sequence: Synthetic oligonucleotide
uagaggagaaaaauuuaau

SEQ ID NO: 7264 - RNA, 19 nt, Artificial Sequence
  Description of Artificial Sequence: Synthetic oligonucleotide
uuagaggagaaaaauuuaa

SEQ ID NO: 7265 - RNA, 19 nt, Artificial Sequence
  Description of Artificial Sequence: Synthetic oligonucleotide
uuuagaggagaaaaauuua

SEQ ID NO: 7266 - RNA, 19 nt, Artificial Sequence
  Description of Artificial Sequence: Synthetic oligonucleotide
uuuuagaggagaaaaauuu

SEQ ID NO: 7267 - RNA, 19 nt, Artificial Sequence
  Description of Artificial Sequence: Synthetic oligonucleotide
uuuuuagaggagaaaaauu

SEQ ID NO: 7268 - RNA, 19 nt, Artificial Sequence
  Description of Artificial Sequence: Synthetic oligonucleotide
guuuuuagaggagaaaaau

SEQ ID NO: 7269 - RNA, 19 nt, Artificial Sequence
  Description of Artificial Sequence: Synthetic oligonucleotide
aguuuuuagaggagaaaaa

SEQ ID NO: 7270 - RNA, 19 nt, Artificial Sequence
  Description of Artificial Sequence: Synthetic oligonucleotide
caguuuuuagaggagaaaa

SEQ ID NO: 7271 - RNA, 19 nt, Artificial Sequence
  Description of Artificial Sequence: Synthetic oligonucleotide
ucaguuuuuagaggagaaa

SEQ ID NO: 7272 - RNA, 19 nt, Artificial Sequence
  Description of Artificial Sequence: Synthetic oligonucleotide
uucaguuuuuagaggagaa

SEQ ID NO: 7273 - RNA, 21 nt, Artificial Sequence
  Description of Artificial Sequence: Synthetic oligonucleotide
aaacucaacuccaucaagauu

SEQ ID NO: 7274 - RNA, 21 nt, Artificial Sequence
  Description of Artificial Sequence: Synthetic oligonucleotide
acucaacuccaucaagucauu

SEQ ID NO: 7275 - RNA, 21 nt, Artificial Sequence
  Description of Artificial Sequence: Synthetic oligonucleotide
caacuccaucaaguccucauu

SEQ ID NO: 7276 - RNA, 21 nt, Artificial Sequence
  Description of Artificial Sequence: Synthetic oligonucleotide
aguaagaagggcaaaaacauu

SEQ ID NO: 7277 - RNA, 21 nt, Artificial Sequence
  Description of Artificial Sequence: Synthetic oligonucleotide
acccuuguagcagugauaauu

SEQ ID NO: 7278 - RNA, 21 nt, Artificial Sequence
  Description of Artificial Sequence: Synthetic oligonucleotide
cccuuguagcagugauaaauu

SEQ ID NO: 7279 - RNA, 21 nt, Artificial Sequence
  Description of Artificial Sequence: Synthetic oligonucleotide
ccuuguagcagugauaagauu

SEQ ID NO: 7280 - RNA, 21 nt, Artificial Sequence
  Description of Artificial Sequence: Synthetic oligonucleotide
cgcugcaauaauggcaucauu

SEQ ID NO: 7281 - RNA, 21 nt, Artificial Sequence
  Description of Artificial Sequence: Synthetic oligonucleotide
gucauuacucaaaccaugauu

SEQ ID NO: 7282 - RNA, 21 nt, Artificial Sequence
  Description of Artificial Sequence: Synthetic oligonucleotide
cauuacucaaaccaugacauu

SEQ ID NO: 7283 - RNA, 21 nt, Artificial Sequence
  Description of Artificial Sequence: Synthetic oligonucleotide
ggauggcagaaucuaggaauu

SEQ ID NO: 7284 - RNA, 21 nt, Artificial Sequence
  Description of Artificial Sequence: Synthetic oligonucleotide
ucuaggaagaccacacacauu

SEQ ID NO: 7285 - RNA, 21 nt, Artificial Sequence
  Description of Artificial Sequence: Synthetic oligonucleotide
ggaagaccacacacuaagauu

SEQ ID NO: 7286 - RNA, 21 nt, Artificial Sequence
  Description of Artificial Sequence: Synthetic oligonucleotide
gaagaccacacacuaagaauu

SEQ ID NO: 7287 - RNA, 21 nt, Artificial Sequence
  Description of Artificial Sequence: Synthetic oligonucleotide
agaccacacacuaagaugauu

SEQ ID NO: 7288 - RNA, 21 nt, Artificial Sequence
  Description of Artificial Sequence: Synthetic oligonucleotide
accacacacuaagaugucauu

SEQ ID NO: 7289 - RNA, 21 nt, Artificial Sequence
  Description of Artificial Sequence: Synthetic oligonucleotide
cacacuaagaugucacauauu

SEQ ID NO: 7290 - RNA, 21 nt, Artificial Sequence
  Description of Artificial Sequence: Synthetic oligonucleotide
cacuaagaugucacauauauu

SEQ ID NO: 7291 - RNA, 21 nt, Artificial Sequence
  Description of Artificial Sequence: Synthetic oligonucleotide
augucacauauaaaagggauu

SEQ ID NO: 7292 - RNA, 21 nt, Artificial Sequence
  Description of Artificial Sequence: Synthetic oligonucleotide
ugaaggguuuugcugugcauu

SEQ ID NO: 7293 - RNA, 21 nt, Artificial Sequence
  Description of Artificial Sequence: Synthetic oligonucleotide
cuggaccaaaaucugcaaauu

SEQ ID NO: 7294 - RNA, 21 nt, Artificial Sequence
  Description of Artificial Sequence: Synthetic oligonucleotide
uggaccaaaaucugcaaaauu

SEQ ID NO: 7295 - RNA, 21 nt, Artificial Sequence
  Description of Artificial Sequence: Synthetic oligonucleotide
caaaaucugcaaaccaguauu

SEQ ID NO: 7296 - RNA, 21 nt, Artificial Sequence
  Description of Artificial Sequence: Synthetic oligonucleotide
aaucugcaaaccagugcuauu

SEQ ID NO: 7297 - RNA, 21 nt, Artificial Sequence
  Description of Artificial Sequence: Synthetic oligonucleotide
guauggaaagaugccaccauu

SEQ ID NO: 7298 - RNA, 21 nt, Artificial Sequence
  Description of Artificial Sequence: Synthetic oligonucleotide
uggaaagaugccaccuacauu

SEQ ID NO: 7299 - RNA, 21 nt, Artificial Sequence
  Description of Artificial Sequence: Synthetic oligonucleotide
uaaugcauuauagcauggauu

SEQ ID NO: 7300 - RNA, 21 nt, Artificial Sequence
  Description of Artificial Sequence: Synthetic oligonucleotide
acacagagcagaauuuucauu

SEQ ID NO: 7301 - RNA, 21 nt, Artificial Sequence
  Description of Artificial Sequence: Synthetic oligonucleotide
uggcaacacauagaucauauu

SEQ ID NO: 7302 - RNA, 21 nt, Artificial Sequence
  Description of Artificial Sequence: Synthetic oligonucleotide
ggcaacacauagaucauaauu

SEQ ID NO: 7303 - RNA, 21 nt, Artificial Sequence
  Description of Artificial Sequence: Synthetic oligonucleotide
gcaacacauagaucauauauu

SEQ ID NO: 7304 - RNA, 21 nt, Artificial Sequence
  Description of Artificial Sequence: Synthetic oligonucleotide
gaaauguuaaugagauguauu

SEQ ID NO: 7305 - RNA, 21 nt, Artificial Sequence
  Description of Artificial Sequence: Synthetic oligonucleotide
uauuuucuuauagagauaauu

SEQ ID NO: 7306 - RNA, 21 nt, Artificial Sequence
  Description of Artificial Sequence: Synthetic oligonucleotide
ucuuacagaaagcuuuguauu

SEQ ID NO: 7307 - RNA, 21 nt, Artificial Sequence
  Description of Artificial Sequence: Synthetic oligonucleotide
uuacagaaagcuuuguagauu

SEQ ID NO: 7308 - RNA, 21 nt, Artificial Sequence
  Description of Artificial Sequence: Synthetic oligonucleotide
agcuuuguagcagaauauauu

SEQ ID NO: 7309 - RNA, 21 nt, Artificial Sequence
  Description of Artificial Sequence: Synthetic oligonucleotide
gcuuuguagcagaauauaauu

SEQ ID NO: 7310 - RNA, 21 nt, Artificial Sequence
  Description of Artificial Sequence: Synthetic oligonucleotide
gcagaauauauuugcagcauu

SEQ ID NO: 7311 - RNA, 21 nt, Artificial Sequence
  Description of Artificial Sequence: Synthetic oligonucleotide
uauuugcagcuauugacuauu

SEQ ID NO: 7312 - RNA, 21 nt, Artificial Sequence
  Description of Artificial Sequence: Synthetic oligonucleotide
agcuauugacuuuguaauauu

SEQ ID NO: 7313 - RNA, 21 nt, Artificial Sequence
  Description of Artificial Sequence: Synthetic oligonucleotide
ucuugauggaguugaguuuuu

SEQ ID NO: 7314 - RNA, 21 nt, Artificial Sequence
  Description of Artificial Sequence: Synthetic oligonucleotide
ugacuugauggaguugaguuu

SEQ ID NO: 7315 - RNA, 21 nt, Artificial Sequence
  Description of Artificial Sequence: Synthetic oligonucleotide
ugaggacuugauggaguuguu

SEQ ID NO: 7316 - RNA, 21 nt, Artificial Sequence
  Description of Artificial Sequence: Synthetic oligonucleotide
uguuuuugcccuucuuacuuu

SEQ ID NO: 7317 - RNA, 21 nt, Artificial Sequence
  Description of Artificial Sequence: Synthetic oligonucleotide
uuaucacugcuacaaggguuu

SEQ ID NO: 7318 - RNA, 21 nt, Artificial Sequence
  Description of Artificial Sequence: Synthetic oligonucleotide
uuuaucacugcuacaaggguu

SEQ ID NO: 7319 - RNA, 21 nt, Artificial Sequence
  Description of Artificial Sequence: Synthetic oligonucleotide
ucuuaucacugcuacaagguu

SEQ ID NO: 7320 - RNA, 21 nt, Artificial Sequence
  Description of Artificial Sequence: Synthetic oligonucleotide
ugaugccauuauugcagcguu

SEQ ID NO: 7321 - RNA, 21 nt, Artificial Sequence
  Description of Artificial Sequence: Synthetic oligonucleotide
ucaugguuugaguaaugacuu

SEQ ID NO: 7322 - RNA, 21 nt, Artificial Sequence
  Description of Artificial Sequence: Synthetic oligonucleotide
ugucaugguuugaguaauguu

SEQ ID NO: 7323 - RNA, 21 nt, Artificial Sequence
  Description of Artificial Sequence: Synthetic oligonucleotide
uuccuagauucugccauccuu

SEQ ID NO: 7324 - RNA, 21 nt, Artificial Sequence
  Description of Artificial Sequence: Synthetic oligonucleotide
uguguguggucuuccuagauu

SEQ ID NO: 7325 - RNA, 21 nt, Artificial Sequence
  Description of Artificial Sequence: Synthetic oligonucleotide
ucuuaguguguggucuuccuu

SEQ ID NO: 7326 - RNA, 21 nt, Artificial Sequence
  Description of Artificial Sequence: Synthetic oligonucleotide
uucuuaguguguggucuucuu

SEQ ID NO: 7327 - RNA, 21 nt, Artificial Sequence
  Description of Artificial Sequence: Synthetic oligonucleotide
ucaucuuaguguguggucuuu

SEQ ID NO: 7328 - RNA, 21 nt, Artificial Sequence
  Description of Artificial Sequence: Synthetic oligonucleotide
ugacaucuuagugugugguuu

SEQ ID NO: 7329 - RNA, 21 nt, Artificial Sequence
  Description of Artificial Sequence: Synthetic oligonucleotide
uaugugacaucuuaguguguu

SEQ ID NO: 7330 - RNA, 21 nt, Artificial Sequence
  Description of Artificial Sequence: Synthetic oligonucleotide
uauaugugacaucuuaguguu

SEQ ID NO: 7331 - RNA, 21 nt, Artificial Sequence
  Description of Artificial Sequence: Synthetic oligonucleotide
ucccuuuuauaugugacauuu

SEQ ID NO: 7332 - RNA, 21 nt, Artificial Sequence
  Description of Artificial Sequence: Synthetic oligonucleotide
ugcacagcaaaacccuucauu

SEQ ID NO: 7333 - RNA, 21 nt, Artificial Sequence
  Description of Artificial Sequence: Synthetic oligonucleotide
uuugcagauuuugguccaguu

SEQ ID NO: 7334 - RNA, 21 nt, Artificial Sequence
  Description of Artificial Sequence: Synthetic oligonucleotide
uuuugcagauuuugguccauu

SEQ ID NO: 7335 - RNA, 21 nt, Artificial Sequence
  Description of Artificial Sequence: Synthetic oligonucleotide
uacugguuugcagauuuuguu

SEQ ID NO: 7336 - RNA, 21 nt, Artificial Sequence
  Description of Artificial Sequence: Synthetic oligonucleotide
uagcacugguuugcagauuuu

SEQ ID NO: 7337 - RNA, 21 nt, Artificial Sequence
  Description of Artificial Sequence: Synthetic oligonucleotide
ugguggcaucuuuccauacuu

SEQ ID NO: 7338 - RNA, 21 nt, Artificial Sequence
  Description of Artificial Sequence: Synthetic oligonucleotide
uguagguggcaucuuuccauu

SEQ ID NO: 7339 - RNA, 21 nt, Artificial Sequence
  Description of Artificial Sequence: Synthetic oligonucleotide
uccaugcuauaaugcauuauu

SEQ ID NO: 7340 - RNA, 21 nt, Artificial Sequence
  Description of Artificial Sequence: Synthetic oligonucleotide
ugaaaauucugcucuguguuu

SEQ ID NO: 7341 - RNA, 21 nt, Artificial Sequence
  Description of Artificial Sequence: Synthetic oligonucleotide
uaugaucuauguguugccauu

SEQ ID NO: 7342 - RNA, 21 nt, Artificial Sequence
  Description of Artificial Sequence: Synthetic oligonucleotide
uuaugaucuauguguugccuu

SEQ ID NO: 7343 - RNA, 21 nt, Artificial Sequence
  Description of Artificial Sequence: Synthetic oligonucleotide
uauaugaucuauguguugcuu

SEQ ID NO: 7344 - RNA, 21 nt, Artificial Sequence
  Description of Artificial Sequence: Synthetic oligonucleotide
uacaucucauuaacauuucuu

SEQ ID NO: 7345 - RNA, 21 nt, Artificial Sequence
  Description of Artificial Sequence: Synthetic oligonucleotide
uuaucucuauaagaaaauauu

SEQ ID NO: 7346 - RNA, 21 nt, Artificial Sequence
  Description of Artificial Sequence: Synthetic oligonucleotide
uacaaagcuuucuguaagauu

SEQ ID NO: 7347 - RNA, 21 nt, Artificial Sequence
  Description of Artificial Sequence: Synthetic oligonucleotide
ucuacaaagcuuucuguaauu

SEQ ID NO: 7348 - RNA, 21 nt, Artificial Sequence
  Description of Artificial Sequence: Synthetic oligonucleotide
uauauucugcuacaaagcuuu

SEQ ID NO: 7349 - RNA, 21 nt, Artificial Sequence
  Description of Artificial Sequence: Synthetic oligonucleotide
uuauauucugcuacaaagcuu

SEQ ID NO: 7350 - RNA, 21 nt, Artificial Sequence
  Description of Artificial Sequence: Synthetic oligonucleotide
ugcugcaaauauauucugcuu

SEQ ID NO: 7351 - RNA, 21 nt, Artificial Sequence
  Description of Artificial Sequence: Synthetic oligonucleotide
uagucaauagcugcaaauauu

SEQ ID NO: 7352 - RNA, 21 nt, Artificial Sequence
  Description of Artificial Sequence: Synthetic oligonucleotide
uauuacaaagucaauagcuuu

SEQ ID NO: 7353 - RNA, 21 nt, Artificial Sequence
  Description of Artificial Sequence: Synthetic oligonucleotide
aaacucaacuccaucaagauu

SEQ ID NO: 7354 - RNA, 21 nt, Artificial Sequence
  Description of Artificial Sequence: Synthetic oligonucleotide
aaacucaacuccaucaagauu

SEQ ID NO: 7355 - RNA, 21 nt, Artificial Sequence
  Description of Artificial Sequence: Synthetic oligonucleotide
aaacucaacuccaucaagauu

SEQ ID NO: 7356 - RNA, 21 nt, Artificial Sequence
  Description of Artificial Sequence: Synthetic oligonucleotide
aaacucaacuccaucaagauu

SEQ ID NO: 7357 - RNA, 21 nt, Artificial Sequence
  Description of Artificial Sequence: Synthetic oligonucleotide
aaacucaacuccaucaagauu

SEQ ID NO: 7358 - RNA, 21 nt, Artificial Sequence
  Description of Artificial Sequence: Synthetic oligonucleotide
aaacucaacuccaucaagauu

SEQ ID NO: 7359 - RNA, 21 nt, Artificial Sequence
  Description of Artificial Sequence: Synthetic oligonucleotide
acucaacuccaucaagucauu

SEQ ID NO: 7360 - RNA, 21 nt, Artificial Sequence
  Description of Artificial Sequence: Synthetic oligonucleotide
caacuccaucaaguccucauu

SEQ ID NO: 7361 - RNA, 21 nt, Artificial Sequence
  Description of Artificial Sequence: Synthetic oligonucleotide
caacuccaucaaguccucauu

SEQ ID NO: 7362 - RNA, 21 nt, Artificial Sequence
  Description of Artificial Sequence: Synthetic oligonucleotide
caacuccaucaaguccucauu

SEQ ID NO: 7363 - RNA, 21 nt, Artificial Sequence
  Description of Artificial Sequence: Synthetic oligonucleotide
caacuccaucaaguccucauu

SEQ ID NO: 7364 - RNA, 21 nt, Artificial Sequence
  Description of Artificial Sequence: Synthetic oligonucleotide
caacuccaucaaguccucauu

SEQ ID NO: 7365 - RNA, 21 nt, Artificial Sequence
  Description of Artificial Sequence: Synthetic oligonucleotide
caacuccaucaaguccucauu

SEQ ID NO: 7366 - RNA, 21 nt, Artificial Sequence
  Description of Artificial Sequence: Synthetic oligonucleotide
caacuccaucaaguccucauu

SEQ ID NO: 7367 - RNA, 21 nt, Artificial Sequence
  Description of Artificial Sequence: Synthetic oligonucleotide
caacuccaucaaguccucauu

SEQ ID NO: 7368 - RNA, 21 nt, Artificial Sequence
  Description of Artificial Sequence: Synthetic oligonucleotide
aguaagaagggcaaaaacauu

SEQ ID NO: 7369 - RNA, 21 nt, Artificial Sequence
  Description of Artificial Sequence: Synthetic oligonucleotide
aguaagaagggcaaaaacauu

SEQ ID NO: 7370 - RNA, 21 nt, Artificial Sequence
  Description of Artificial Sequence: Synthetic oligonucleotide
aguaagaagggcaaaaacauu

SEQ ID NO: 7371 - RNA, 21 nt, Artificial Sequence
  Description of Artificial Sequence: Synthetic oligonucleotide
aguaagaagggcaaaaacauu

SEQ ID NO: 7372 - RNA, 21 nt, Artificial Sequence
  Description of Artificial Sequence: Synthetic oligonucleotide
aguaagaagggcaaaaacauu

SEQ ID NO: 7373 - RNA, 21 nt, Artificial Sequence
  Description of Artificial Sequence: Synthetic oligonucleotide
aguaagaagggcaaaaacauu

SEQ ID NO: 7374 - RNA, 21 nt, Artificial Sequence
  Description of Artificial Sequence: Synthetic oligonucleotide
aguaagaagggcaaaaacauu

SEQ ID NO: 7375 - RNA, 21 nt, Artificial Sequence
  Description of Artificial Sequence: Synthetic oligonucleotide
aguaagaagggcaaaaacauu

SEQ ID NO: 7376 - RNA, 21 nt, Artificial Sequence
  Description of Artificial Sequence: Synthetic oligonucleotide
aguaagaagggcaaaaacauu

SEQ ID NO: 7377 - RNA, 21 nt, Artificial Sequence
  Description of Artificial Sequence: Synthetic oligonucleotide
aguaagaagggcaaaaacauu

SEQ ID NO: 7378 - RNA, 21 nt, Artificial Sequence
  Description of Artificial Sequence: Synthetic oligonucleotide
aguaagaagggcaaaaacauu

SEQ ID NO: 7379 - RNA, 21 nt, Artificial Sequence
  Description of Artificial Sequence: Synthetic oligonucleotide
aguaagaagggcaaaaacauu

SEQ ID NO: 7380 - RNA, 21 nt, Artificial Sequence
  Description of Artificial Sequence: Synthetic oligonucleotide
aguaagaagggcaaaaacauu

SEQ ID NO: 7381 - RNA, 21 nt, Artificial Sequence
  Description of Artificial Sequence: Synthetic oligonucleotide
aguaagaagggcaaaaacauu

SEQ ID NO: 7382 - RNA, 21 nt, Artificial Sequence
  Description of Artificial Sequence: Synthetic oligonucleotide
aguaagaagggcaaaaacauu

SEQ ID NO: 7383 - RNA, 21 nt, Artificial Sequence
  Description of Artificial Sequence: Synthetic oligonucleotide
aguaagaagggcaaaaacauu

SEQ ID NO: 7384 - RNA, 21 nt, Artificial Sequence
  Description of Artificial Sequence: Synthetic oligonucleotide
aguaagaagggcaaaaacauu

SEQ ID NO: 7385 - RNA, 21 nt, Artificial Sequence
  Description of Artificial Sequence: Synthetic oligonucleotide
aguaagaagggcaaaaacauu

SEQ ID NO: 7386 - RNA, 21 nt, Artificial Sequence
  Description of Artificial Sequence: Synthetic oligonucleotide
aguaagaagggcaaaaacauu

SEQ ID NO: 7387 - RNA, 21 nt, Artificial Sequence
  Description of Artificial Sequence: Synthetic oligonucleotide
aguaagaagggcaaaaacauu

SEQ ID NO: 7388 - RNA, 21 nt, Artificial Sequence
  Description of Artificial Sequence: Synthetic oligonucleotide
aguaagaagggcaaaaacauu

SEQ ID NO: 7389 - RNA, 21 nt, Artificial Sequence
  Description of Artificial Sequence: Synthetic oligonucleotide
aguaagaagggcaaaaacauu

SEQ ID NO: 7390 - RNA, 21 nt, Artificial Sequence
  Description of Artificial Sequence: Synthetic oligonucleotide
aguaagaagggcaaaaacauu

SEQ ID NO: 7391 - RNA, 21 nt, Artificial Sequence
  Description of Artificial Sequence: Synthetic oligonucleotide
aguaagaagggcaaaaacauu

SEQ ID NO: 7392 - RNA, 21 nt, Artificial Sequence
  Description of Artificial Sequence: Synthetic oligonucleotide
aguaagaagggcaaaaacauu

SEQ ID NO: 7393 - RNA, 21 nt, Artificial Sequence
  Description of Artificial Sequence: Synthetic oligonucleotide
aguaagaagggcaaaaacauu

SEQ ID NO: 7394 - RNA, 21 nt, Artificial Sequence
  Description of Artificial Sequence: Synthetic oligonucleotide
aguaagaagggcaaaaacauu

SEQ ID NO: 7395 - RNA, 21 nt, Artificial Sequence
  Description of Artificial Sequence: Synthetic oligonucleotide
aguaagaagggcaaaaacauu

SEQ ID NO: 7396 - RNA, 21 nt, Artificial Sequence
  Description of Artificial Sequence: Synthetic oligonucleotide
aguaagaagggcaaaaacauu

SEQ ID NO: 7397 - RNA, 21 nt, Artificial Sequence
  Description of Artificial Sequence: Synthetic oligonucleotide
aguaagaagggcaaaaacauu

SEQ ID NO: 7398 - RNA, 21 nt, Artificial Sequence
  Description of Artificial Sequence: Synthetic oligonucleotide
aguaagaagggcaaaaacauu

SEQ ID NO: 7399 - RNA, 21 nt, Artificial Sequence
  Description of Artificial Sequence: Synthetic oligonucleotide
cccuuguagcagugauaaauu

SEQ ID NO: 7400 - RNA, 21 nt, Artificial Sequence
  Description of Artificial Sequence: Synthetic oligonucleotide
cccuuguagcagugauaaauu

SEQ ID NO: 7401 - RNA, 21 nt, Artificial Sequence
  Description of Artificial Sequence: Synthetic oligonucleotide
cccuuguagcagugauaaauu

SEQ ID NO: 7402 - DNA, 21 bp, Artificial Sequence
  Description of Artificial Sequence: Synthetic oligonucleotide
  Description of Combined DNA/RNA Molecule: Synthetic oligonucleotide
ccuuguagcagugauaagauu

SEQ ID NO: 7403 - DNA, 21 bp, Artificial Sequence
  Description of Artificial Sequence: Synthetic oligonucleotide
  Description of Combined DNA/RNA Molecule: Synthetic oligonucleotide
cgcugcaauaauggcaucauu

SEQ ID NO: 7404 - RNA, 21 nt, Artificial Sequence
  Description of Artificial Sequence: Synthetic oligonucleotide
gucauuacucaaaccaugauu

SEQ ID NO: 7405 - RNA, 21 nt, Artificial Sequence
  Description of Artificial Sequence: Synthetic oligonucleotide
gucauuacucaaaccaugauu

SEQ ID NO: 7406 - RNA, 21 nt, Artificial Sequence
  Description of Artificial Sequence: Synthetic oligonucleotide
gucauuacucaaaccaugauu

SEQ ID NO: 7407 - RNA, 21 nt, Artificial Sequence
  Description of Artificial Sequence: Synthetic oligonucleotide
gucauuacucaaaccaugauu

SEQ ID NO: 7408 - RNA, 21 nt, Artificial Sequence
  Description of Artificial Sequence: Synthetic oligonucleotide
gucauuacucaaaccaugauu

SEQ ID NO: 7409 - RNA, 21 nt, Artificial Sequence
  Description of Artificial Sequence: Synthetic oligonucleotide
gucauuacucaaaccaugauu

SEQ ID NO: 7410 - RNA, 21 nt, Artificial Sequence
  Description of Artificial Sequence: Synthetic oligonucleotide
cauuacucaaaccaugacauu

SEQ ID NO: 7411 - RNA, 21 nt, Artificial Sequence
  Description of Artificial Sequence: Synthetic oligonucleotide
ggauggcagaaucuaggaauu

SEQ ID NO: 7412 - RNA, 21 nt, Artificial Sequence
  Description of Artificial Sequence: Synthetic oligonucleotide
ggauggcagaaucuaggaauu

SEQ ID NO: 7413 - RNA, 21 nt, Artificial Sequence
  Description of Artificial Sequence: Synthetic oligonucleotide
ggauggcagaaucuaggaauu

SEQ ID NO: 7414 - RNA, 21 nt, Artificial Sequence
  Description of Artificial Sequence: Synthetic oligonucleotide
ggauggcagaaucuaggaauu

SEQ ID NO: 7415 - RNA, 21 nt, Artificial Sequence
  Description of Artificial Sequence: Synthetic oligonucleotide
ggauggcagaaucuaggaauu

SEQ ID NO: 7416 - RNA, 21 nt, Artificial Sequence
  Description of Artificial Sequence: Synthetic oligonucleotide
ggauggcagaaucuaggaauu

SEQ ID NO: 7417 - RNA, 21 nt, Artificial Sequence
  Description of Artificial Sequence: Synthetic oligonucleotide
ggauggcagaaucuaggaauu

SEQ ID NO: 7418 - RNA, 21 nt, Artificial Sequence
  Description of Artificial Sequence: Synthetic oligonucleotide
ggauggcagaaucuaggaauu

SEQ ID NO: 7419 - RNA, 21 nt, Artificial Sequence
  Description of Artificial Sequence: Synthetic oligonucleotide
ggauggcagaaucuaggaauu

SEQ ID NO: 7420 - RNA, 21 nt, Artificial Sequence
  Description of Artificial Sequence: Synthetic oligonucleotide
ggauggcagaaucuaggaauu

SEQ ID NO: 7421 - RNA, 21 nt, Artificial Sequence
  Description of Artificial Sequence: Synthetic oligonucleotide
ggauggcagaaucuaggaauu

SEQ ID NO: 7422 - RNA, 21 nt, Artificial Sequence
  Description of Artificial Sequence: Synthetic oligonucleotide
ggauggcagaaucuaggaauu

SEQ ID NO: 7423 - RNA, 21 nt, Artificial Sequence
  Description of Artificial Sequence: Synthetic oligonucleotide
ggauggcagaaucuaggaauu

SEQ ID NO: 7424 - RNA, 21 nt, Artificial Sequence
  Description of Artificial Sequence: Synthetic oligonucleotide
ggauggcagaaucuaggaauu

SEQ ID NO: 7425 - RNA, 21 nt, Artificial Sequence
  Description of Artificial Sequence: Synthetic oligonucleotide
ggauggcagaaucuaggaauu

SEQ ID NO: 7426 - RNA, 21 nt, Artificial Sequence
  Description of Artificial Sequence: Synthetic oligonucleotide
ggauggcagaaucuaggaauu

SEQ ID NO: 7427 - RNA, 21 nt, Artificial Sequence
  Description of Artificial Sequence: Synthetic oligonucleotide
ucuaggaagaccacacacauu

SEQ ID NO: 7428 - RNA, 21 nt, Artificial Sequence
  Description of Artificial Sequence: Synthetic oligonucleotide
ucuaggaagaccacacacauu

SEQ ID NO: 7429 - RNA, 21 nt, Artificial Sequence
  Description of Artificial Sequence: Synthetic oligonucleotide
ucuaggaagaccacacacauu

SEQ ID NO: 7430 - RNA, 21 nt, Artificial Sequence
  Description of Artificial Sequence: Synthetic oligonucleotide
ucuaggaagaccacacacauu

SEQ ID NO: 7431 - RNA, 21 nt, Artificial Sequence
  Description of Artificial Sequence: Synthetic oligonucleotide
ucuaggaagaccacacacauu

SEQ ID NO: 7432 - RNA, 21 nt, Artificial Sequence
  Description of Artificial Sequence: Synthetic oligonucleotide
ucuaggaagaccacacacauu

SEQ ID NO: 7433 - RNA, 21 nt, Artificial Sequence
  Description of Artificial Sequence: Synthetic oligonucleotide
ucuaggaagaccacacacauu

SEQ ID NO: 7434 - RNA, 21 nt, Artificial Sequence
  Description of Artificial Sequence: Synthetic oligonucleotide
ucuaggaagaccacacacauu

SEQ ID NO: 7435 - RNA, 21 nt, Artificial Sequence
  Description of Artificial Sequence: Synthetic oligonucleotide
ucuaggaagaccacacacauu

SEQ ID NO: 7436 - RNA, 21 nt, Artificial Sequence
  Description of Artificial Sequence: Synthetic oligonucleotide
ucuaggaagaccacacacauu

SEQ ID NO: 7437 - RNA, 21 nt, Artificial Sequence
  Description of Artificial Sequence: Synthetic oligonucleotide
ucuaggaagaccacacacauu

SEQ ID NO: 7438 - RNA, 21 nt, Artificial Sequence
  Description of Artificial Sequence: Synthetic oligonucleotide
ucuaggaagaccacacacauu

SEQ ID NO: 7439 - RNA, 21 nt, Artificial Sequence
  Description of Artificial Sequence: Synthetic oligonucleotide
ucuaggaagaccacacacauu

SEQ ID NO: 7440 - RNA, 21 nt, Artificial Sequence
  Description of Artificial Sequence: Synthetic oligonucleotide
ucuaggaagaccacacacauu

SEQ ID NO: 7441 - RNA, 21 nt, Artificial Sequence
  Description of Artificial Sequence: Synthetic oligonucleotide
ucuaggaagaccacacacauu

SEQ ID NO: 7442 - RNA, 21 nt, Artificial Sequence
  Description of Artificial Sequence: Synthetic oligonucleotide
ucuaggaagaccacacacauu

SEQ ID NO: 7443 - RNA, 21 nt, Artificial Sequence
  Description of Artificial Sequence: Synthetic oligonucleotide
ggaagaccacacacuaagauu

SEQ ID NO: 7444 - RNA, 21 nt, Artificial Sequence
  Description of Artificial Sequence: Synthetic oligonucleotide
ggaagaccacacacuaagauu

SEQ ID NO: 7445 - RNA, 21 nt, Artificial Sequence
  Description of Artificial Sequence: Synthetic oligonucleotide
ggaagaccacacacuaagauu

SEQ ID NO: 7446 - RNA, 21 nt, Artificial Sequence
  Description of Artificial Sequence: Synthetic oligonucleotide
gaagaccacacacuaagaauu

SEQ ID NO: 7447 - RNA, 21 nt, Artificial Sequence
  Description of Artificial Sequence: Synthetic oligonucleotide
gaagaccacacacuaagaauu

SEQ ID NO: 7448 - RNA, 21 nt, Artificial Sequence
  Description of Artificial Sequence: Synthetic oligonucleotide
gaagaccacacacuaagaauu

SEQ ID NO: 7449 - RNA, 21 nt, Artificial Sequence
  Description of Artificial Sequence: Synthetic oligonucleotide
agaccacacacuaagaugauu

SEQ ID NO: 7450 - RNA, 21 nt, Artificial Sequence
  Description of Artificial Sequence: Synthetic oligonucleotide
agaccacacacuaagaugauu

SEQ ID NO: 7451 - RNA, 21 nt, Artificial Sequence
  Description of Artificial Sequence: Synthetic oligonucleotide
agaccacacacuaagaugauu

SEQ ID NO: 7452 - RNA, 21 nt, Artificial Sequence
  Description of Artificial Sequence: Synthetic oligonucleotide
accacacacuaagaugucauu

SEQ ID NO: 7453 - RNA, 21 nt, Artificial Sequence
  Description of Artificial Sequence: Synthetic oligonucleotide
accacacacuaagaugucauu

SEQ ID NO: 7454 - RNA, 21 nt, Artificial Sequence
  Description of Artificial Sequence: Synthetic oligonucleotide
accacacacuaagaugucauu

SEQ ID NO: 7455 - RNA, 21 nt, Artificial Sequence
  Description of Artificial Sequence: Synthetic oligonucleotide
cacacuaagaugucacauauu

SEQ ID NO: 7456 - DNA, 21 bp, Artificial Sequence
  Description of Artificial Sequence: Synthetic oligonucleotide
  Description of Combined DNA/RNA Molecule: Synthetic oligonucleotide
cacuaagaugucacauauauu

SEQ ID NO: 7457 - RNA, 21 nt, Artificial Sequence
  Description of Artificial Sequence: Synthetic oligonucleotide
augucacauauaaaagggauu

SEQ ID NO: 7458 - RNA, 21 nt, Artificial Sequence
  Description of Artificial Sequence: Synthetic oligonucleotide
augucacauauaaaagggauu

SEQ ID NO: 7459 - RNA, 21 nt, Artificial Sequence
  Description of Artificial Sequence: Synthetic oligonucleotide
augucacauauaaaagggauu

SEQ ID NO: 7460 - RNA, 21 nt, Artificial Sequence
  Description of Artificial Sequence: Synthetic oligonucleotide
ugaaggguuuugcugugcauu

SEQ ID NO: 7461 - RNA, 21 nt, Artificial Sequence
  Description of Artificial Sequence: Synthetic oligonucleotide
cuggaccaaaaucugcaaauu

SEQ ID NO: 7462 - RNA, 21 nt, Artificial Sequence
  Description of Artificial Sequence: Synthetic oligonucleotide
cuggaccaaaaucugcaaauu

SEQ ID NO: 7463 - RNA, 21 nt, Artificial Sequence
  Description of Artificial Sequence: Synthetic oligonucleotide
cuggaccaaaaucugcaaauu

SEQ ID NO: 7464 - RNA, 21 nt, Artificial Sequence
  Description of Artificial Sequence: Synthetic oligonucleotide
cuggaccaaaaucugcaaauu

SEQ ID NO: 7465 - RNA, 21 nt, Artificial Sequence
  Description of Artificial Sequence: Synthetic oligonucleotide
cuggaccaaaaucugcaaauu

SEQ ID NO: 7466 - RNA, 21 nt, Artificial Sequence
  Description of Artificial Sequence: Synthetic oligonucleotide
cuggaccaaaaucugcaaauu

SEQ ID NO: 7467 - RNA, 21 nt, Artificial Sequence
  Description of Artificial Sequence: Synthetic oligonucleotide
uggaccaaaaucugcaaaauu

SEQ ID NO: 7468 - RNA, 21 nt, Artificial Sequence
  Description of Artificial Sequence: Synthetic oligonucleotide
aaucugcaaaccagugcuauu

SEQ ID NO: 7469 - RNA, 21 nt, Artificial Sequence
  Description of Artificial Sequence: Synthetic oligonucleotide
guauggaaagaugccaccauu

SEQ ID NO: 7470 - RNA, 21 nt, Artificial Sequence
  Description of Artificial Sequence: Synthetic oligonucleotide
guauggaaagaugccaccauu

SEQ ID NO: 7471 - RNA, 21 nt, Artificial Sequence
  Description of Artificial Sequence: Synthetic oligonucleotide
guauggaaagaugccaccauu

SEQ ID NO: 7472 - RNA, 21 nt, Artificial Sequence
  Description of Artificial Sequence: Synthetic oligonucleotide
guauggaaagaugccaccauu

SEQ ID NO: 7473 - RNA, 21 nt, Artificial Sequence
  Description of Artificial Sequence: Synthetic oligonucleotide
guauggaaagaugccaccauu

SEQ ID NO: 7474 - RNA, 21 nt, Artificial Sequence
  Description of Artificial Sequence: Synthetic oligonucleotide
guauggaaagaugccaccauu

SEQ ID NO: 7475 - RNA, 21 nt, Artificial Sequence
  Description of Artificial Sequence: Synthetic oligonucleotide
guauggaaagaugccaccauu

SEQ ID NO: 7476 - RNA, 21 nt, Artificial Sequence
  Description of Artificial Sequence: Synthetic oligonucleotide
guauggaaagaugccaccauu

SEQ ID NO: 7477 - RNA, 21 nt, Artificial Sequence
  Description of Artificial Sequence: Synthetic oligonucleotide
guauggaaagaugccaccauu

SEQ ID NO: 7478 - RNA, 21 nt, Artificial Sequence
  Description of Artificial Sequence: Synthetic oligonucleotide
guauggaaagaugccaccauu

SEQ ID NO: 7479 - RNA, 21 nt, Artificial Sequence
  Description of Artificial Sequence: Synthetic oligonucleotide
guauggaaagaugccaccauu

SEQ ID NO: 7480 - RNA, 21 nt, Artificial Sequence
  Description of Artificial Sequence: Synthetic oligonucleotide
guauggaaagaugccaccauu

SEQ ID NO: 7481 - RNA, 21 nt, Artificial Sequence
  Description of Artificial Sequence: Synthetic oligonucleotide
guauggaaagaugccaccauu

SEQ ID NO: 7482 - RNA, 21 nt, Artificial Sequence
  Description of Artificial Sequence: Synthetic oligonucleotide
guauggaaagaugccaccauu

SEQ ID NO: 7483 - RNA, 21 nt, Artificial Sequence
  Description of Artificial Sequence: Synthetic oligonucleotide
guauggaaagaugccaccauu

SEQ ID NO: 7484 - RNA, 21 nt, Artificial Sequence
  Description of Artificial Sequence: Synthetic oligonucleotide
guauggaaagaugccaccauu

SEQ ID NO: 7485 - RNA, 21 nt, Artificial Sequence
  Description of Artificial Sequence: Synthetic oligonucleotide
guauggaaagaugccaccauu

SEQ ID NO: 7486 - RNA, 21 nt, Artificial Sequence
  Description of Artificial Sequence: Synthetic oligonucleotide
guauggaaagaugccaccauu

SEQ ID NO: 7487 - RNA, 21 nt, Artificial Sequence
  Description of Artificial Sequence: Synthetic oligonucleotide
guauggaaagaugccaccauu

SEQ ID NO: 7488 - RNA, 21 nt, Artificial Sequence
  Description of Artificial Sequence: Synthetic oligonucleotide
guauggaaagaugccaccauu

SEQ ID NO: 7489 - RNA, 21 nt, Artificial Sequence
  Description of Artificial Sequence: Synthetic oligonucleotide
guauggaaagaugccaccauu

SEQ ID NO: 7490 - RNA, 21 nt, Artificial Sequence
  Description of Artificial Sequence: Synthetic oligonucleotide
guauggaaagaugccaccauu

SEQ ID NO: 7491 - RNA, 21 nt, Artificial Sequence
  Description of Artificial Sequence: Synthetic oligonucleotide
guauggaaagaugccaccauu

SEQ ID NO: 7492 - RNA, 21 nt, Artificial Sequence
  Description of Artificial Sequence: Synthetic oligonucleotide
guauggaaagaugccaccauu

SEQ ID NO: 7493 - RNA, 21 nt, Artificial Sequence
  Description of Artificial Sequence: Synthetic oligonucleotide
guauggaaagaugccaccauu

SEQ ID NO: 7494 - RNA, 21 nt, Artificial Sequence
  Description of Artificial Sequence: Synthetic oligonucleotide
guauggaaagaugccaccauu

SEQ ID NO: 7495 - RNA, 21 nt, Artificial Sequence
  Description of Artificial Sequence: Synthetic oligonucleotide
guauggaaagaugccaccauu

SEQ ID NO: 7496 - RNA, 21 nt, Artificial Sequence
  Description of Artificial Sequence: Synthetic oligonucleotide
guauggaaagaugccaccauu

SEQ ID NO: 7497 - RNA, 21 nt, Artificial Sequence
  Description of Artificial Sequence: Synthetic oligonucleotide
guauggaaagaugccaccauu

SEQ ID NO: 7498 - RNA, 21 nt, Artificial Sequence
  Description of Artificial Sequence: Synthetic oligonucleotide
guauggaaagaugccaccauu

SEQ ID NO: 7499 - RNA, 21 nt, Artificial Sequence
  Description of Artificial Sequence: Synthetic oligonucleotide
guauggaaagaugccaccauu

SEQ ID NO: 7500 - DNA, 21 bp, Artificial Sequence
  Description of Artificial Sequence: Synthetic oligonucleotide
  Description of Combined DNA/RNA Molecule: Synthetic oligonucleotide
uggaaagaugccaccuacauu

SEQ ID NO: 7501 - RNA, 21 nt, Artificial Sequence
  Description of Artificial Sequence: Synthetic oligonucleotide
uaaugcauuauagcauggauu

SEQ ID NO: 7502 - RNA, 21 nt, Artificial Sequence
  Description of Artificial Sequence: Synthetic oligonucleotide
uaaugcauuauagcauggauu

SEQ ID NO: 7503 - RNA, 21 nt, Artificial Sequence
  Description of Artificial Sequence: Synthetic oligonucleotide
uaaugcauuauagcauggauu

SEQ ID NO: 7504 - DNA, 21 bp, Artificial Sequence
  Description of Artificial Sequence: Synthetic oligonucleotide
  Description of Combined DNA/RNA Molecule: Synthetic oligonucleotide
acacagagcagaauuuucauu

SEQ ID NO: 7505 - RNA, 21 nt, Artificial Sequence
  Description of Artificial Sequence: Synthetic oligonucleotide
ggcaacacauagaucauaauu

SEQ ID NO: 7506 - RNA, 21 nt, Artificial Sequence
  Description of Artificial Sequence: Synthetic oligonucleotide
ggcaacacauagaucauaauu

SEQ ID NO: 7507 - RNA, 21 nt, Artificial Sequence
  Description of Artificial Sequence: Synthetic oligonucleotide
ggcaacacauagaucauaauu

SEQ ID NO: 7508 - RNA, 21 nt, Artificial Sequence
  Description of Artificial Sequence: Synthetic oligonucleotide
uauuuucuuauagagauaauu

SEQ ID NO: 7509 - RNA, 21 nt, Artificial Sequence
  Description of Artificial Sequence: Synthetic oligonucleotide
uauuuucuuauagagauaauu

SEQ ID NO: 7510 - RNA, 21 nt, Artificial Sequence
  Description of Artificial Sequence: Synthetic oligonucleotide
uauuuucuuauagagauaauu

SEQ ID NO: 7511 - RNA, 21 nt, Artificial Sequence
  Description of Artificial Sequence: Synthetic oligonucleotide
uauuuucuuauagagauaauu

SEQ ID NO: 7512 - RNA, 21 nt, Artificial Sequence
  Description of Artificial Sequence: Synthetic oligonucleotide
uauuuucuuauagagauaauu

SEQ ID NO: 7513 - RNA, 21 nt, Artificial Sequence
  Description of Artificial Sequence: Synthetic oligonucleotide
uauuuucuuauagagauaauu

SEQ ID NO: 7514 - RNA, 21 nt, Artificial Sequence
  Description of Artificial Sequence: Synthetic oligonucleotide
uauuuucuuauagagauaauu

SEQ ID NO: 7515 - RNA, 21 nt, Artificial Sequence
  Description of Artificial Sequence: Synthetic oligonucleotide
uauuuucuuauagagauaauu

SEQ ID NO: 7516 - RNA, 21 nt, Artificial Sequence
  Description of Artificial Sequence: Synthetic oligonucleotide
uauuuucuuauagagauaauu

SEQ ID NO: 7517 - RNA, 21 nt, Artificial Sequence
  Description of Artificial Sequence: Synthetic oligonucleotide
uauuuucuuauagagauaauu

SEQ ID NO: 7518 - RNA, 21 nt, Artificial Sequence
  Description of Artificial Sequence: Synthetic oligonucleotide
uauuuucuuauagagauaauu

SEQ ID NO: 7519 - RNA, 21 nt, Artificial Sequence
  Description of Artificial Sequence: Synthetic oligonucleotide
uauuuucuuauagagauaauu

SEQ ID NO: 7520 - RNA, 21 nt, Artificial Sequence
  Description of Artificial Sequence: Synthetic oligonucleotide
uauuuucuuauagagauaauu

SEQ ID NO: 7521 - RNA, 21 nt, Artificial Sequence
  Description of Artificial Sequence: Synthetic oligonucleotide
uauuuucuuauagagauaauu

SEQ ID NO: 7522 - RNA, 21 nt, Artificial Sequence
  Description of Artificial Sequence: Synthetic oligonucleotide
uauuuucuuauagagauaauu

SEQ ID NO: 7523 - RNA, 21 nt, Artificial Sequence
  Description of Artificial Sequence: Synthetic oligonucleotide
uauuuucuuauagagauaauu

SEQ ID NO: 7524 - RNA, 21 nt, Artificial Sequence
  Description of Artificial Sequence: Synthetic oligonucleotide
uauuuucuuauagagauaauu

SEQ ID NO: 7525 - RNA, 21 nt, Artificial Sequence
  Description of Artificial Sequence: Synthetic oligonucleotide
uauuuucuuauagagauaauu

SEQ ID NO: 7526 - RNA, 21 nt, Artificial Sequence
  Description of Artificial Sequence: Synthetic oligonucleotide
ucuuacagaaagcuuuguauu

SEQ ID NO: 7527 - RNA, 21 nt, Artificial Sequence
  Description of Artificial Sequence: Synthetic oligonucleotide
ucuuacagaaagcuuuguauu

SEQ ID NO: 7528 - RNA, 21 nt, Artificial Sequence
  Description of Artificial Sequence: Synthetic oligonucleotide
ucuuacagaaagcuuuguauu

SEQ ID NO: 7529 - RNA, 21 nt, Artificial Sequence
  Description of Artificial Sequence: Synthetic oligonucleotide
ucuuacagaaagcuuuguauu

SEQ ID NO: 7530 - RNA, 21 nt, Artificial Sequence
  Description of Artificial Sequence: Synthetic oligonucleotide
ucuuacagaaagcuuuguauu

SEQ ID NO: 7531 - RNA, 21 nt, Artificial Sequence
  Description of Artificial Sequence: Synthetic oligonucleotide
ucuuacagaaagcuuuguauu

SEQ ID NO: 7532 - RNA, 21 nt, Artificial Sequence
  Description of Artificial Sequence: Synthetic oligonucleotide
ucuuacagaaagcuuuguauu

SEQ ID NO: 7533 - RNA, 21 nt, Artificial Sequence
  Description of Artificial Sequence: Synthetic oligonucleotide
ucuuacagaaagcuuuguauu

SEQ ID NO: 7534 - RNA, 21 nt, Artificial Sequence
  Description of Artificial Sequence: Synthetic oligonucleotide
ucuuacagaaagcuuuguauu

SEQ ID NO: 7535 - RNA, 21 nt, Artificial Sequence
  Description of Artificial Sequence: Synthetic oligonucleotide
ucuuacagaaagcuuuguauu

SEQ ID NO: 7536 - RNA, 21 nt, Artificial Sequence
  Description of Artificial Sequence: Synthetic oligonucleotide
ucuuacagaaagcuuuguauu

SEQ ID NO: 7537 - RNA, 21 nt, Artificial Sequence
  Description of Artificial Sequence: Synthetic oligonucleotide
ucuuacagaaagcuuuguauu

SEQ ID NO: 7538 - RNA, 21 nt, Artificial Sequence
  Description of Artificial Sequence: Synthetic oligonucleotide
ucuuacagaaagcuuuguauu

SEQ ID NO: 7539 - RNA, 21 nt, Artificial Sequence
  Description of Artificial Sequence: Synthetic oligonucleotide
ucuuacagaaagcuuuguauu

SEQ ID NO: 7540 - RNA, 21 nt, Artificial Sequence
  Description of Artificial Sequence: Synthetic oligonucleotide
uuacagaaagcuuuguagauu

SEQ ID NO: 7541 - RNA, 21 nt, Artificial Sequence
  Description of Artificial Sequence: Synthetic oligonucleotide
uuacagaaagcuuuguagauu

SEQ ID NO: 7542 - RNA, 21 nt, Artificial Sequence
  Description of Artificial Sequence: Synthetic oligonucleotide
uuacagaaagcuuuguagauu

SEQ ID NO: 7543 - RNA, 21 nt, Artificial Sequence
  Description of Artificial Sequence: Synthetic oligonucleotide
uuacagaaagcuuuguagauu

SEQ ID NO: 7544 - RNA, 21 nt, Artificial Sequence
  Description of Artificial Sequence: Synthetic oligonucleotide
uuacagaaagcuuuguagauu

SEQ ID NO: 7545 - RNA, 21 nt, Artificial Sequence
  Description of Artificial Sequence: Synthetic oligonucleotide
uuacagaaagcuuuguagauu

SEQ ID NO: 7546 - RNA, 21 nt, Artificial Sequence
  Description of Artificial Sequence: Synthetic oligonucleotide
uuacagaaagcuuuguagauu

SEQ ID NO: 7547 - RNA, 21 nt, Artificial Sequence
  Description of Artificial Sequence: Synthetic oligonucleotide
uuacagaaagcuuuguagauu

SEQ ID NO: 7548 - RNA, 21 nt, Artificial Sequence
  Description of Artificial Sequence: Synthetic oligonucleotide
uuacagaaagcuuuguagauu

SEQ ID NO: 7549 - RNA, 21 nt, Artificial Sequence
  Description of Artificial Sequence: Synthetic oligonucleotide
uuacagaaagcuuuguagauu

SEQ ID NO: 7550 - RNA, 21 nt, Artificial Sequence
  Description of Artificial Sequence: Synthetic oligonucleotide
uuacagaaagcuuuguagauu

SEQ ID NO: 7551 - RNA, 21 nt, Artificial Sequence
  Description of Artificial Sequence: Synthetic oligonucleotide
uuacagaaagcuuuguagauu

SEQ ID NO: 7552 - RNA, 21 nt, Artificial Sequence
  Description of Artificial Sequence: Synthetic oligonucleotide
uuacagaaagcuuuguagauu

SEQ ID NO: 7553 - RNA, 21 nt, Artificial Sequence
  Description of Artificial Sequence: Synthetic oligonucleotide
uuacagaaagcuuuguagauu

SEQ ID NO: 7554 - RNA, 21 nt, Artificial Sequence
  Description of Artificial Sequence: Synthetic oligonucleotide
uuacagaaagcuuuguagauu

SEQ ID NO: 7555 - RNA, 21 nt, Artificial Sequence
  Description of Artificial Sequence: Synthetic oligonucleotide
uuacagaaagcuuuguagauu

SEQ ID NO: 7556 - RNA, 21 nt, Artificial Sequence
  Description of Artificial Sequence: Synthetic oligonucleotide
gcuuuguagcagaauauaauu

SEQ ID NO: 7557 - RNA, 21 nt, Artificial Sequence
  Description of Artificial Sequence: Synthetic oligonucleotide
gcuuuguagcagaauauaauu

SEQ ID NO: 7558 - RNA, 21 nt, Artificial Sequence
  Description of Artificial Sequence: Synthetic oligonucleotide
gcuuuguagcagaauauaauu

SEQ ID NO: 7559 - RNA, 21 nt, Artificial Sequence
  Description of Artificial Sequence: Synthetic oligonucleotide
gcagacugugaauuuguguuu

SEQ ID NO: 7560 - RNA, 21 nt, Artificial Sequence
  Description of Artificial Sequence: Synthetic oligonucleotide
uguaccaaacaacgcaagauu

SEQ ID NO: 7561 - RNA, 21 nt, Artificial Sequence
  Description of Artificial Sequence: Synthetic oligonucleotide
cuccaagaugccucauauauu

SEQ ID NO: 7562 - RNA, 21 nt, Artificial Sequence
  Description of Artificial Sequence: Synthetic oligonucleotide
cugcauugauggguuuuguuu

SEQ ID NO: 7563 - RNA, 21 nt, Artificial Sequence
  Description of Artificial Sequence: Synthetic oligonucleotide
cuauuauuaaaagaaagcauu

SEQ ID NO: 7564 - RNA, 21 nt, Artificial Sequence
  Description of Artificial Sequence: Synthetic oligonucleotide
guaauaacauaucucuaauuu

SEQ ID NO: 7565 - RNA, 21 nt, Artificial Sequence
  Description of Artificial Sequence: Synthetic oligonucleotide
uaauaacauaucucuaaucuu

SEQ ID NO: 7566 - RNA, 21 nt, Artificial Sequence
  Description of Artificial Sequence: Synthetic oligonucleotide
uuaauaaauuacucucacuuu

SEQ ID NO: 7567 - RNA, 21 nt, Artificial Sequence
  Description of Artificial Sequence: Synthetic oligonucleotide
uauuuucugaaacuauugauu

SEQ ID NO: 7568 - RNA, 21 nt, Artificial Sequence
  Description of Artificial Sequence: Synthetic oligonucleotide
uuucacuauuuucugauuauu

SEQ ID NO: 7569 - RNA, 21 nt, Artificial Sequence
  Description of Artificial Sequence: Synthetic oligonucleotide
aauguacacauuugugaaauu

SEQ ID NO: 7570 - RNA, 21 nt, Artificial Sequence
  Description of Artificial Sequence: Synthetic oligonucleotide
cugcauugauggguuuuguuu

SEQ ID NO: 7571 - RNA, 21 nt, Artificial Sequence
  Description of Artificial Sequence: Synthetic oligonucleotide
aaacucaacuccaucaagauu

SEQ ID NO: 7572 - RNA, 21 nt, Artificial Sequence
  Description of Artificial Sequence: Synthetic oligonucleotide
caaaaucugcaaaccaguauu

SEQ ID NO: 7573 - RNA, 21 nt, Artificial Sequence
  Description of Artificial Sequence: Synthetic oligonucleotide
ucuuacagaaagcuuuguauu

SEQ ID NO: 7574 - RNA, 21 nt, Artificial Sequence
  Description of Artificial Sequence: Synthetic oligonucleotide
uuacagaaagcuuuguagauu

SEQ ID NO: 7575 - RNA, 21 nt, Artificial Sequence
  Description of Artificial Sequence: Synthetic oligonucleotide
agcuuuguagcagaauauauu

SEQ ID NO: 7576 - RNA, 21 nt, Artificial Sequence
  Description of Artificial Sequence: Synthetic oligonucleotide
gcuuuguagcagaauauaauu

SEQ ID NO: 7577 - RNA, 21 nt, Artificial Sequence
  Description of Artificial Sequence: Synthetic oligonucleotide
gcagaauauauuugcagcauu

SEQ ID NO: 7578 - RNA, 21 nt, Artificial Sequence
  Description of Artificial Sequence: Synthetic oligonucleotide
gaagguagaugguguuauauu

SEQ ID NO: 7579 - RNA, 21 nt, Artificial Sequence
  Description of Artificial Sequence: Synthetic oligonucleotide
acacaaauucacagucugcuu

SEQ ID NO: 7580 - RNA, 21 nt, Artificial Sequence
  Description of Artificial Sequence: Synthetic oligonucleotide
ucuugcguuguuugguacauu

SEQ ID NO: 7581 - RNA, 21 nt, Artificial Sequence
  Description of Artificial Sequence: Synthetic oligonucleotide
uauaugaggcaucuuggaguu

SEQ ID NO: 7582 - RNA, 21 nt, Artificial Sequence
  Description of Artificial Sequence: Synthetic oligonucleotide
acaaaacccaucaaugcaguu

SEQ ID NO: 7583 - RNA, 21 nt, Artificial Sequence
  Description of Artificial Sequence: Synthetic oligonucleotide
ugcuuucuuuuaauaauaguu

SEQ ID NO: 7584 - RNA, 21 nt, Artificial Sequence
  Description of Artificial Sequence: Synthetic oligonucleotide
auuagagauauguuauuacuu

SEQ ID NO: 7585 - RNA, 21 nt, Artificial Sequence
  Description of Artificial Sequence: Synthetic oligonucleotide
uauuagagauauguuauuauu

SEQ ID NO: 7586 - RNA, 21 nt, Artificial Sequence
  Description of Artificial Sequence: Synthetic oligonucleotide
agugagaguaauuuauuaauu

SEQ ID NO: 7587 - RNA, 21 nt, Artificial Sequence
  Description of Artificial Sequence: Synthetic oligonucleotide
ucaauaguuucagaaaauauu

SEQ ID NO: 7588 - RNA, 21 nt, Artificial Sequence
  Description of Artificial Sequence: Synthetic oligonucleotide
uaaucagaaaauagugaaauu

SEQ ID NO: 7589 - RNA, 21 nt, Artificial Sequence
  Description of Artificial Sequence: Synthetic oligonucleotide
uuucacaaauguguacauuuu

SEQ ID NO: 7590 - RNA, 21 nt, Artificial Sequence
  Description of Artificial Sequence: Synthetic oligonucleotide
acaaaacccaucaaugcaguu

SEQ ID NO: 7591 - RNA, 21 nt, Artificial Sequence
  Description of Artificial Sequence: Synthetic oligonucleotide
ucuugauggaguugaguuuuu

SEQ ID NO: 7592 - RNA, 21 nt, Artificial Sequence
  Description of Artificial Sequence: Synthetic oligonucleotide
uacugguuugcagauuuuguu

SEQ ID NO: 7593 - RNA, 21 nt, Artificial Sequence
  Description of Artificial Sequence: Synthetic oligonucleotide
uacaaagcuuucuguaagauu

SEQ ID NO: 7594 - RNA, 21 nt, Artificial Sequence
  Description of Artificial Sequence: Synthetic oligonucleotide
ucuacaaagcuuucuguaauu

SEQ ID NO: 7595 - RNA, 21 nt, Artificial Sequence
  Description of Artificial Sequence: Synthetic oligonucleotide
uauauucugcuacaaagcuuu

SEQ ID NO: 7596 - RNA, 21 nt, Artificial Sequence
  Description of Artificial Sequence: Synthetic oligonucleotide
uuauauucugcuacaaagcuu

SEQ ID NO: 7597 - RNA, 21 nt, Artificial Sequence
  Description of Artificial Sequence: Synthetic oligonucleotide
ugcugcaaauauauucugcuu

SEQ ID NO: 7598 - RNA, 21 nt, Artificial Sequence
  Description of Artificial Sequence: Synthetic oligonucleotide
uauaacaccaucuaccuucuu

SEQ ID NO: 7599 - DNA, 3654 bp, Homo sapiens
agcagagagagagaaagcgggagcccgcggcgagcgtagcgcaagtccgctccctaggcatcgctgcgctggcagcgattcgctgtctcttgtgagtcaggggacaacgcttcggggcaactgtgagtgcgcgtgtgggggacctcgattctcttcagatctcgaggattcggtccggggacgtctcctgatcccctactaaagcgcctgctaactttgaaaaggagcactgtgtcctgcaaagtttgacacataaaggataggaaaagagaggagagaaaagcaactgagttgaaggagaaggagctgatgcgggcctcctgatcaattaagaggagagttaaaccgccgagatcccggcgggaccaaggaggtgcggggcaagaaggaacggaagcggtgcgatccacagggctgggttttcttgcaccttgggtcacgcctccttggcgagaaagcgcctcgcatttgattgcttccagttattgcagaacttcctgtcctggtggagaagcgggtctcgcttgggttccgctaatttctgtcctgaggcgtgagactgagttcatagggtcctgggtccccgaaccaggaagggttgagggaacacaatctgcaagcccccgcgacccaagtgaggggccccgtgttggggtcctccctccctttgcattcccacccctccgggctttgcgtcttcctggggaccccctcgccgggagatggccgcgttgatgcggagcaaggattcgtcctgctgcctgctcctactggccgcggtgctgatggtggagagctcacagatcggcagttcgcgggccaaactcaactccatcaagtcctctctgggcggggagacgcctggtcaggccgccaatcgatctgcgggcatgtaccaaggactggcattcggcggcagtaagaagggcaaaaacctggggcaggcctacccttgtagcagtgataaggagtgtgaagttgggaggtattgccacagtccccaccaaggatcatcggcctgcatggtgtgtcggagaaaaaagaagcgctgccaccgagatggcatgtgctgccccagtacccgctgcaataatggcatctgtatcccagttactgaaagcatcttaacccctcacatcccggctctggatggtactcggcacagagatcgaaaccacggtcattactcaaaccatgacttgggatggcagaatctaggaagaccacacactaagatgtcacatataaaagggcatgaaggagacccctgcctacgatcatcagactgcattgaagggttttgctgtgctcgtcatttctggaccaaaatctgcaaaccagtgctccatcagggggaagtctgtaccaaacaacgcaagaagggttctcatgggctggaaattttccagcgttgcgactgtgcgaagggcctgtcttgcaaagtatggaaagatgccacctactcctccaaagccagactccatgtgtgtcagaaaatttgatcaccattgaggaacatcatcaattgcagactgtgaagttgtgtatttaatgcattatagcatggtggaaaataaggttcagatgcagaagaatggctaaaataagaaacgtgataagaatatagatgatcacaaaaagggagaaagaaaacatgaactgaatagattagaatgggtgacaaatgcagtgcagccagtgtttccattatgcaacttgtctatgtaaataatgtacacatttgtggaaaatgctattattaagagaacaagcacacagtggaaattactgatgagtagcatgtgactttccaagagtttaggttgtgctggaggagaggtttccttcagattgctgattgcttatacaaataacctacatgccagatttctattcaacgttagagtttaacaaaatactcctagaataacttgttatacaataggttctaaaaataaaattgctaaacaagaaatgaaaacatggagcattgttaatttacaacagaaaattaccttttgatttgtaacactacttctgctgttcaatcaagagtcttggtagataagaaaaaaatcagtcaatatttccaaataattgcaaaataatggccagttgtttaggaaggcctttaggaagacaaataaataacaaacaaacagccacaaatacttttttttcaaaattttagttttacctgtaattaataagaactgatacaagacaaaaacagttccttcagattctacggaatgacagtatatctctctttatcctatgtgattcctgctctgaatgcattatattttccaaactatacccataaattgtgactagtaaaatacttacacagagcagaattttcacagatggcaaaaaaatttaaagatgtccaatatatgtgggaaaagagctaacagagagatcattatttcttaaagattggccataacctgtattttgatagaattagattggtaaatacatgtattcatacatactctgtggtaatagagacttgagctggatctgtactgcactggagtaagcaagaaaattgggaaaactttttcgtttgttcaggttttggcaacacatagatcatatgtctgaggcacaagttggctgttcatctttgaaaccaggggatgcacagtctaaatgaatatctgcatgggatttgctatcataatatttactatgcagatgaattcagtgtgaggtcctgtgtccgtactatcctcaaattatttattttatagtgctgagatcctcaaataatctcaatttcaggaggtttcacaaaatggactcctgaagtagacagagtagtgaggtttcattgccctctataagcttctgactagccaatggcatcatccaattttcttcccaaacctctgcagcatctgctttattgccaaagggctagtttcggttttctgcagccattgcggttaaaaaatataagtaggataacttgtaaaacctgcatattgctaatctatagacaccacagtttctaaattctttgaaaccactttactactttttttaaacttaactcagttctaaatactttgtctggagcacaaaacaataaaaggttatcttatagtcgtgactttaaacttttgtagaccacaattcactttttagttttcttttacttaaatcccatctgcagtctcaaatttaagttctcccagtagagattgagtttgagcctgtatatctattaaaaatttcaacttcccacatatatttactaagatgattaagacttacattttctgcacaggtctgcaaaaacaaaaattataaactagtccatccaagaaccaaagtttgtataaacaggttgctataagcttggtgaaatgaaaatggaacatttcaatcaaacatttcctatataacaattattatatttacaatttggtttctgcaatatttttcttatgtccacccttttaaaaattattatttgaagtaatttatttacaggaaatgttaatgagatgtattttcttatagagatatttcttacagaaagctttgtagcagaatatatttgcagctattgactttgtaatttaggaaaaatgtataataagataaaatctattaaatttttctcctctaaaaactgaa

SEQ ID NO: 7600 - RNA, 21 nt, Artificial Sequence
  Description of Artificial Sequence: Synthetic oligonucleotide
  modified_base (1)..(1): 2' fluoro-modified a, c, u, g, or other
  misc_feature (1)..(2): Phosphorothioate linkage
  modified_base (2)..(2): 2' O-methyl modified a, c, u, g, or other
  misc_feature (2)..(3): Phosphorothioate linkage
  modified_base (3)..(3): 2' fluoro-modified a, c, u, g, or other
  modified_base (4)..(4): 2' O-methyl modified a, c, u, g, or other
  modified_base (5)..(5): 2' fluoro-modified a, c, u, g, or other
  modified_base (6)..(6): 2' O-methyl modified a, c, u, g, or other
  modified_base (7)..(7): 2' fluoro-modified a, c, u, g, or other
  modified_base (8)..(8): 2' fluoro-modified a, c, u, g, or other
  modified_base (9)..(9): 2' fluoro-modified a, c, u, g, or other
  modified_base (10)..(10): 2' O-methyl modified a, c, u, g, or other
  modified_base (11)..(11): 2' fluoro-modified a, c, u, g, or other
  modified_base (12)..(12): 2' O-methyl modified a, c, u, g, or other
  modified_base (13)..(13): 2' fluoro-modified a, c, u, g, or other
  modified_base (14)..(14): 2' O-methyl modified a, c, u, g, or other
  modified_base (15)..(15): 2' fluoro-modified a, c, u, g, or other
  modified_base (16)..(16): 2' O-methyl modified a, c, u, g, or other
  modified_base (17)..(17): 2' fluoro-modified a, c, u, g, or other
  modified_base (18)..(18): 2' O-methyl modified a, c, u, g, or other
  modified_base (19)..(19): 2' fluoro-modified a, c, u, g, or other
  misc_feature (19)..(20): Phosphorothioate linkage
  modified_base (20)..(20): 2' O-methyl modified a, c, u, g, or other
  misc_feature (20)..(21): Phosphorothioate linkage
  modified_base (21)..(21): 2' O-methyl modified a, c, u, g, or other
nnnnnnnnnnnnnnnnnnnnn

SEQ ID NO: 7601 - RNA, 21 nt, Artificial Sequence
  Description of Artificial Sequence: Synthetic oligonucleotide
  modified_base (1)..(1): 2' O-methyl modified a, c, u, g, or other
  misc_feature (1)..(2): Phosphorothioate linkage
  modified_base (2)..(2): 2' O-methyl modified a, c, u, g, or other
  misc_feature (2)..(3): Phosphorothioate linkage
  modified_base (3)..(3): 2' O-methyl modified a, c, u, g, or other
  modified_base (4)..(4): 2' O-methyl modified a, c, u, g, or other
  modified_base (5)..(5): 2' fluoro-modified a, c, u, g, or other
  modified_base (6)..(6): 2' O-methyl modified a, c, u, g, or other
  modified_base (7)..(7): 2' fluoro-modified a, c, u, g, or other
  modified_base (8)..(8): 2' fluoro-modified a, c, u, g, or other
  modified_base (9)..(9): 2' fluoro-modified a, c, u, g, or other
  modified_base (10)..(10): 2' O-methyl modified a, c, u, g, or other
  modified_base (11)..(11): 2' O-methyl modified a, c, u, g, or other
  modified_base (12)..(12): 2' O-methyl modified a, c, u, g, or other
  modified_base (13)..(13): 2' O-methyl modified a, c, u, g, or other
  modified_base (14)..(14): 2' O-methyl modified a, c, u, g, or other
  modified_base (15)..(15): 2' O-methyl modified a, c, u, g, or other
  modified_base (16)..(16): 2' O-methyl modified a, c, u, g, or other
  modified_base (17)..(17): 2' O-methyl modified a, c, u, g, or other
  modified_base (18)..(18): 2' O-methyl modified a, c, u, g, or other
  modified_base (19)..(19): 2' O-methyl modified a, c, u, g, or other
  misc_feature (19)..(20): Phosphorothioate linkage
  modified_base (20)..(20): 2' O-methyl modified a, c, u, g, or other
  misc_feature (20)..(21): Phosphorothioate linkage
  modified_base (21)..(21): 2' O-methyl modified a, c, u, g, or other
nnnnnnnnnnnnnnnnnnnnn

SEQ ID NO: 7602 - RNA, 21 nt, Artificial Sequence
  Description of Artificial Sequence: Synthetic oligonucleotide
  modified_base (1)..(1): 2' O-methyl modified a, c, u, g, or other
  misc_feature (1)..(2): Phosphorothioate linkage
  modified_base (2)..(2): 2' O-methyl modified a, c, u, g, or other
  misc_feature (2)..(3): Phosphorothioate linkage
  modified_base (3)..(3): 2' O-methyl modified a, c, u, g, or other
  modified_base (4)..(4): 2' O-methyl modified a, c, u, g, or other
  modified_base (5)..(5): 2' fluoro-modified a, c, u, g, or other
  modified_base (6)..(6): 2' O-methyl modified a, c, u, g, or other
  modified_base (7)..(7): 2' fluoro-modified a, c, u, g, or other
  modified_base (8)..(8): 2' O-methyl modified a, c, u, g, or other
  modified_base (9)..(9): 2' fluoro-modified a, c, u, g, or other
  modified_base (10)..(10): 2' O-methyl modified a, c, u, g, or other
  modified_base (11)..(11): 2' O-methyl modified a, c, u, g, or other
  modified_base (12)..(12): 2' O-methyl modified a, c, u, g, or other
  modified_base (13)..(13): 2' O-methyl modified a, c, u, g, or other
  modified_base (14)..(14): 2' O-methyl modified a, c, u, g, or other
  modified_base (15)..(15): 2' O-methyl modified a, c, u, g, or other
  modified_base (16)..(16): 2' O-methyl modified a, c, u, g, or other
  modified_base (17)..(17): 2' O-methyl modified a, c, u, g, or other
  modified_base (18)..(18): 2' O-methyl modified a, c, u, g, or other
  modified_base (19)..(19): 2' O-methyl modified a, c, u, g, or other
  misc_feature (19)..(20): Phosphorothioate linkage
  modified_base (20)..(20): 2' O-methyl modified a, c, u, g, or other
  misc_feature (20)..(21): Phosphorothioate linkage
  modified_base (21)..(21): 2' O-methyl modified a, c, u, g, or other
nnnnnnnnnnnnnnnnnnnnn

SEQ ID NO: 7603 - RNA, 22 nt, Artificial Sequence
  Description of Artificial Sequence: Synthetic oligonucleotide
  modified_base (1)..(1): 2' fluoro-modified a, c, u, g, or other
  misc_feature (1)..(2): Phosphorothioate linkage
  modified_base (2)..(2): 2' O-methyl modified a, c, u, g, or other
  misc_feature (2)..(3): Phosphorothioate linkage
  modified_base (3)..(3): 2' fluoro-modified a, c, u, g, or other
  modified_base (4)..(4): 2' O-methyl modified a, c, u, g, or other
  modified_base (5)..(5): 2' fluoro-modified a, c, u, g, or other
  modified_base (6)..(6): 2' O-methyl modified a, c, u, g, or other
  modified_base (7)..(7): 2' fluoro-modified a, c, u, g, or other
  modified_base (8)..(8): 2' fluoro-modified a, c, u, g, or other
  modified_base (9)..(9): 2' fluoro-modified a, c, u, g, or other
  modified_base (10)..(10): 2' O-methyl modified a, c, u, g, or other
  modified_base (11)..(11): 2' fluoro-modified a, c, u, g, or other
  modified_base (12)..(12): 2' O-methyl modified a, c, u, g, or other
  modified_base (13)..(13): 2' fluoro-modified a, c, u, g, or other
  modified_base (14)..(14): 2' O-methyl modified a, c, u, g, or other
  modified_base (15)..(15): 2' fluoro-modified a, c, u, g, or other
  modified_base (16)..(16): 2' O-methyl modified a, c, u, g, or other
  modified_base (17)..(17): 2' fluoro-modified a, c, u, g, or other
  modified_base (18)..(18): 2' O-methyl modified a, c, u, g, or other
  modified_base (19)..(19): 2' fluoro-modified a, c, u, g, or other
  misc_feature (19)..(20): Phosphorothioate linkage
  modified_base (20)..(20): 2' O-methyl modified a, c, u, g, or other
  misc_feature (20)..(21): Phosphorothioate linkage
  modified_base (21)..(21): 2' O-methyl modified a, c, u, g, or other
  modified_base (22)..(22): a, c, u, g, unknown or other
nnnnnnnnnnnnnnnnnnnnnn

SEQ ID NO: 7604 - RNA, 22 nt, Artificial Sequence
  Description of Artificial Sequence: Synthetic oligonucleotide
  modified_base (1)..(1): 2' O-methyl modified a, c, u, g, or other
  misc_feature (1)..(2): Phosphorothioate linkage
  modified_base (2)..(2): 2' O-methyl modified a, c, u, g, or other
  misc_feature (2)..(3): Phosphorothioate linkage
  modified_base (3)..(3): 2' O-methyl modified a, c, u, g, or other
  modified_base (4)..(4): 2' O-methyl modified a, c, u, g, or other
  modified_base (5)..(5): 2' fluoro-modified a, c, u, g, or other
  modified_base (6)..(6): 2' O-methyl modified a, c, u, g, or other
  modified_base (7)..(7): 2' fluoro-modified a, c, u, g, or other
  modified_base (8)..(8): 2' fluoro-modified a, c, u, g, or other
  modified_base (9)..(9): 2' fluoro-modified a, c, u, g, or other
  modified_base (10)..(10): 2' O-methyl modified a, c, u, g, or other
  modified_base (11)..(11): 2' O-methyl modified a, c, u, g, or other
  modified_base (12)..(12): 2' O-methyl modified a, c, u, g, or other
  modified_base (13)..(13): 2' O-methyl modified a, c, u, g, or other
  modified_base (14)..(14): 2' O-methyl modified a, c, u, g, or other
  modified_base (15)..(15): 2' O-methyl modified a, c, u, g, or other
  modified_base (16)..(16): 2' O-methyl modified a, c, u, g, or other
  modified_base (17)..(17): 2' O-methyl modified a, c, u, g, or other
  modified_base (18)..(18): 2' O-methyl modified a, c, u, g, or other
  modified_base (19)..(19): 2' O-methyl modified a, c, u, g, or other
  misc_feature (19)..(20): Phosphorothioate linkage
  modified_base (20)..(20): 2' O-methyl modified a, c, u, g, or other
  misc_feature (20)..(21): Phosphorothioate linkage
  modified_base (21)..(21): 2' O-methyl modified a, c, u, g, or other
  modified_base (22)..(22): a, c, u, g, unknown or other
nnnnnnnnnnnnnnnnnnnnnn

SEQ ID NO: 7605 - RNA, 21 nt, Artificial Sequence
  Description of Artificial Sequence: Synthetic oligonucleotide
  modified_base (1)..(1): 2' O-methyl modified a, c, u, g, or other
  modified_base (2)..(2): 2' O-methyl modified a, c, u, g, or other
  modified_base (3)..(3): 2' O-methyl modified a, c, u, g, or other
  modified_base (4)..(4): 2' O-methyl modified a, c, u, g, or other
  modified_base (5)..(5): 2' fluoro-modified a, c, u, g, or other
  modified_base (6)..(6): 2' fluoro-modified a, c, u, g, or other
  modified_base (7)..(7): 2' O-methyl modified a, c, u, g, or other
  modified_base (8)..(8): 2' O-methyl modified a, c, u, g, or other
  modified_base (9)..(9): 2' fluoro-modified a, c, u, g, or other
  modified_base (10)..(10): 2' fluoro-modified a, c, u, g, or other
  modified_base (11)..(11): 2' O-methyl modified a, c, u, g, or other
  modified_base (12)..(12): 2' O-methyl modified a, c, u, g, or other
  modified_base (13)..(13): 2' O-methyl modified a, c, u, g, or other
  modified_base (14)..(14): 2' O-methyl modified a, c, u, g, or other
  modified_base (15)..(15): 2' O-methyl modified a, c, u, g, or other
  modified_base (16)..(16): 2' O-methyl modified a, c, u, g, or other
  modified_base (17)..(17): 2' O-methyl modified a, c, u, g, or other
  modified_base (18)..(18): 2' O-methyl modified a, c, u, g, or other
  modified_base (19)..(19): 2' O-methyl modified a, c, u, g, or other
  misc_feature (19)..(20): Phosphorothioate linkage
  modified_base (20)..(20): 2' O-methyl modified a, c, u, g, or other
  misc_feature (20)..(21): Phosphorothioate linkage
  modified_base (21)..(21): 2' O-methyl modified a, c, u, g, or other
nnnnnnnnnnnnnnnnnnnnn

SEQ ID NO: 7606 - RNA, 21 nt, Artificial Sequence
  Description of Artificial Sequence: Synthetic oligonucleotide
  modified_base (1)..(1): 2' O-methyl modified a, c, u, g, or other
  modified_base (2)..(2): 2' O-methyl modified a, c, u, g, or other
  modified_base (3)..(3): 2' O-methyl modified a, c, u, g, or other
  modified_base (4)..(4): 2' O-methyl modified a, c, u, g, or other
  modified_base (5)..(5): 2' O-methyl modified a, c, u, g, or other
  modified_base (6)..(6): 2' O-methyl modified a, c, u, g, or other
  modified_base (7)..(7): 2' fluoro-modified a, c, u, g, or other
  modified_base (8)..(8): 2' fluoro-modified a, c, u, g, or other
  modified_base (9)..(9): 2' fluoro-modified a, c, u, g, or other
  modified_base (10)..(10): 2' fluoro-modified a, c, u, g, or other
  modified_base (11)..(11): 2' O-methyl modified a, c, u, g, or other
  modified_base (12)..(12): 2' O-methyl modified a, c, u, g, or other
  modified_base (13)..(13): 2' O-methyl modified a, c, u, g, or other
  modified_base (14)..(14): 2' O-methyl modified a, c, u, g, or other
  modified_base (15)..(15): 2' O-methyl modified a, c, u, g, or other
  modified_base (16)..(16): 2' O-methyl modified a, c, u, g, or other
  modified_base (17)..(17): 2' O-methyl modified a, c, u, g, or other
  modified_base (18)..(18): 2' O-methyl modified a, c, u, g, or other
  modified_base (19)..(19): 2' O-methyl modified a, c, u, g, or other
  misc_feature (19)..(20): Phosphorothioate linkage
  modified_base (20)..(20): 2' O-methyl modified a, c, u, g, or other
  misc_feature (20)..(21): Phosphorothioate linkage
  modified_base (21)..(21): 2' O-methyl modified a, c, u, g, or other
nnnnnnnnnnnnnnnnnnnnn

SEQ ID NO: 7607 - RNA, 21 nt, Artificial Sequence
  Description of Artificial Sequence: Synthetic oligonucleotide
  modified_base (1)..(1): 2' O-methyl modified a, c, u, g, or other
  modified_base (2)..(2): 2' O-methyl modified a, c, u, g, or other
  modified_base (3)..(3): 2' O-methyl modified a, c, u, g, or other
  modified_base (4)..(4): 2' O-methyl modified a, c, u, g, or other
  modified_base (5)..(5): 2' O-methyl modified a, c, u, g, or other
  modified_base (6)..(6): 2' fluoro-modified a, c, u, g, or other
  modified_base (7)..(7): 2' fluoro-modified a, c, u, g, or other
  modified_base (8)..(8): 2' fluoro-modified a, c, u, g, or other
  modified_base (9)..(9): 2' fluoro-modified a, c, u, g, or other
  modified_base (10)..(10): 2' O-methyl modified a, c, u, g, or other
  modified_base (11)..(11): 2' O-methyl modified a, c, u, g, or other
  modified_base (12)..(12): 2' O-methyl modified a, c, u, g, or other
  modified_base (13)..(13): 2' O-methyl modified a, c, u, g, or other
  modified_base (14)..(14): 2' O-methyl modified a, c, u, g, or other
  modified_base (15)..(15): 2' O-methyl modified a, c, u, g, or other
  modified_base (16)..(16): 2' O-methyl modified a, c, u, g, or other
  modified_base (17)..(17): 2' O-methyl modified a, c, u, g, or other
  modified_base (18)..(18): 2' O-methyl modified a, c, u, g, or other
  modified_base (19)..(19): 2' O-methyl modified a, c, u, g, or other
  misc_feature (19)..(20): Phosphorothioate linkage
  modified_base (20)..(20): 2' O-methyl modified a, c, u, g, or other
  misc_feature (20)..(21): Phosphorothioate linkage
  modified_base (21)..(21): 2' O-methyl modified a, c, u, g, or other
nnnnnnnnnnnnnnnnnnnnn

SEQ ID NO: 7608 - RNA, 21 nt, Artificial Sequence
  Description of Artificial Sequence: Synthetic oligonucleotide
  modified_base (1)..(1): 2' O-methyl modified a, c, u, g, or other
  modified_base (2)..(2): 2' O-methyl modified a, c, u, g, or other
  modified_base (3)..(3): 2' O-methyl modified a, c, u, g, or other
  modified_base (4)..(4): 2' O-methyl modified a, c, u, g, or other
  modified_base (5)..(5): 2' O-methyl modified a, c, u, g, or other
  modified_base (6)..(6): 2' O-methyl modified a, c, u, g, or other
  modified_base (7)..(7): 2' fluoro-modified a, c, u, g, or other
  modified_base (8)..(8): 2' O-methyl modified a, c, u, g, or other
  modified_base (9)..(9): 2' fluoro-modified a, c, u, g, or other
  modified_base (10)..(10): 2' fluoro-modified a, c, u, g, or other
  modified_base (11)..(11): 2' O-methyl modified a, c, u, g, or other
  modified_base (12)..(12): 2' O-methyl modified a, c, u, g, or other
  modified_base (13)..(13): 2' O-methyl modified a, c, u, g, or other
  modified_base (14)..(14): 2' O-methyl modified a, c, u, g, or other
  modified_base (15)..(15): 2' O-methyl modified a, c, u, g, or other
  modified_base (16)..(16): 2' O-methyl modified a, c, u, g, or other
  modified_base (17)..(17): 2' O-methyl modified a, c, u, g, or other
  modified_base (18)..(18): 2' O-methyl modified a, c, u, g, or other
  modified_base (19)..(19): 2' O-methyl modified a, c, u, g, or other
  misc_feature (19)..(20): Phosphorothioate linkage
  modified_base (20)..(20): 2' O-methyl modified a, c, u, g, or other
  misc_feature (20)..(21): Phosphorothioate linkage
  modified_base (21)..(21): 2' O-methyl modified a, c, u, g, or other
nnnnnnnnnnnnnnnnnnnnn

SEQ ID NO: 7609 - RNA, 21 nt, Artificial Sequence
  Description of Artificial Sequence: Synthetic oligonucleotide
  modified_base (1)..(1): 2' O-methyl modified a, c, u, g, or other
  modified_base (2)..(2): 2' O-methyl modified a, c, u, g, or other
  modified_base (3)..(3): 2' O-methyl modified a, c, u, g, or other
  modified_base (4)..(4): 2' O-methyl modified a, c, u, g, or other
  modified_base (5)..(5): 2' O-methyl modified a, c, u, g, or other
  modified_base (6)..(6): 2' O-methyl modified a, c, u, g, or other
  modified_base (7)..(7): 2' O-methyl modified a, c, u, g, or other
  modified_base (8)..(8): 2' fluoro-modified a, c, u, g, or other
  modified_base (9)..(9): 2' fluoro-modified a, c, u, g, or other
  modified_base (10)..(10): 2' O-methyl modified a, c, u, g, or other
  modified_base (11)..(11): 2' fluoro-modified a, c, u, g, or other
  modified_base (12)..(12): 2' O-methyl modified a, c, u, g, or other
  modified_base (13)..(13): 2' O-methyl modified a, c, u, g, or other
  modified_base (14)..(14): 2' O-methyl modified a, c, u, g, or other
  modified_base (15)..(15): 2' O-methyl modified a, c, u, g, or other
  modified_base (16)..(16): 2' O-methyl modified a, c, u, g, or other
  modified_base (17)..(17): 2' O-methyl modified a, c, u, g, or other
  modified_base (18)..(18): 2' O-methyl modified a, c, u, g, or other
  modified_base (19)..(19): 2' O-methyl modified a, c, u, g, or other
  misc_feature (19)..(20): Phosphorothioate linkage
  modified_base (20)..(20): 2' O-methyl modified a, c, u, g, or other
  misc_feature (20)..(21): Phosphorothioate linkage
  modified_base (21)..(21): 2' O-methyl modified a, c, u, g, or other
nnnnnnnnnnnnnnnnnnnnn

SEQ ID NO: 7610 - RNA, 21 nt, Artificial Sequence
  Description of Artificial Sequence: Synthetic oligonucleotide
  modified_base (1)..(1): 2' O-methyl modified a, c, u, g, or other
  modified_base (2)..(2): 2' O-methyl modified a, c, u, g, or other
  modified_base (3)..(3): 2' O-methyl modified a, c, u, g, or other
  modified_base (4)..(4): 2' O-methyl modified a, c, u, g, or other
  modified_base (5)..(5): 2' O-methyl modified a, c, u, g, or other
  modified_base (6)..(6): 2' fluoro-modified a, c, u, g, or other
  modified_base (7)..(7): 2' O-methyl modified a, c, u, g, or other
  modified_base (8)..(8): 2' O-methyl modified a, c, u, g, or other
  modified_base (9)..(9): 2' fluoro-modified a, c, u, g, or other
  modified_base (10)..(10): 2' O-methyl modified a, c, u, g, or other
  modified_base (11)..(11): 2' O-methyl modified a, c, u, g, or other
  modified_base (12)..(12): 2' O-methyl modified a, c, u, g, or other
  modified_base (13)..(13): 2' O-methyl modified a, c, u, g, or other
  modified_base (14)..(14): 2' O-methyl modified a, c, u, g, or other
  modified_base (15)..(15): 2' O-methyl modified a, c, u, g, or other
  modified_base (16)..(16): 2' O-methyl modified a, c, u, g, or other
  modified_base (17)..(17): 2' O-methyl modified a, c, u, g, or other
  modified_base (18)..(18): 2' O-methyl modified a, c, u, g, or other
  modified_base (19)..(19): 2' O-methyl modified a, c, u, g, or other
  misc_feature (19)..(20): Phosphorothioate linkage
  modified_base (20)..(20): 2' O-methyl modified a, c, u, g, or other
  misc_feature (20)..(21): Phosphorothioate linkage
  modified_base (21)..(21): 2' O-methyl modified a, c, u, g, or other
nnnnnnnnnnnnnnnnnnnnn

SEQ ID NO: 7611 - RNA, 21 nt, Artificial Sequence
  Description of Artificial Sequence: Synthetic oligonucleotide
  modified_base (1)..(1): 2' O-methyl modified a, c, u, g, or other
  modified_base (2)..(2): 2' O-methyl modified a, c, u, g, or other
  modified_base (3)..(3): 2' O-methyl modified a, c, u, g, or other
  modified_base (4)..(4): 2' O-methyl modified a, c, u, g, or other
  modified_base (5)..(5): 2' fluoro-modified a, c, u, g, or other
  modified_base (6)..(6): 2' fluoro-modified a, c, u, g, or other
  modified_base (7)..(7): 2' O-methyl modified a, c, u, g, or other
  modified_base (8)..(8): 2' fluoro-modified a, c, u, g, or other
  modified_base (9)..(9): 2' fluoro-modified a, c, u, g, or other
  modified_base (10)..(10): 2' O-methyl modified a, c, u, g, or other
  modified_base (11)..(11): 2' O-methyl modified a, c, u, g, or other
  modified_base (12)..(12): 2' O-methyl modified a, c, u, g, or other
  modified_base (13)..(13): 2' O-methyl modified a, c, u, g, or other
  modified_base (14)..(14): 2' O-methyl modified a, c, u, g, or other
  modified_base (15)..(15): 2' O-methyl modified a, c, u, g, or other
  modified_base (16)..(16): 2' O-methyl modified a, c, u, g, or other
  modified_base (17)..(17): 2' O-methyl modified a, c, u, g, or other
  modified_base (18)..(18): 2' O-methyl modified a, c, u, g, or other
  modified_base (19)..(19): 2' O-methyl modified a, c, u, g, or other
  misc_feature (19)..(20): Phosphorothioate linkage
  modified_base (20)..(20): 2' O-methyl modified a, c, u, g, or other
  misc_feature (20)..(21): Phosphorothioate linkage
  modified_base (21)..(21): 2' O-methyl modified a, c, u, g, or other
nnnnnnnnnnnnnnnnnnnnn

SEQ ID NO: 7612 - RNA, 21 nt, Artificial Sequence
  Description of Artificial Sequence: Synthetic oligonucleotide
  modified_base (1)..(1): 2' O-methyl modified a, c, u, g, or other
  modified_base (2)..(2): 2' O-methyl modified a, c, u, g, or other
  modified_base (3)..(3): 2' O-methyl modified a, c, u, g, or other
  modified_base (4)..(4): 2' O-methyl modified a, c, u, g, or other
  modified_base (5)..(5): 2' fluoro-modified a, c, u, g, or other
  modified_base (6)..(6): 2' O-methyl modified a, c, u, g, or other
  modified_base (7)..(7): 2' O-methyl modified a, c, u, g, or other
  modified_base (8)..(8): 2' O-methyl modified a, c, u, g, or other
  modified_base (9)..(9): 2' fluoro-modified a, c, u, g, or other
  modified_base (10)..(10): 2' fluoro-modified a, c, u, g, or other
  modified_base (11)..(11): 2' O-methyl modified a, c, u, g, or other
  modified_base (12)..(12): 2' O-methyl modified a, c, u, g, or other
  modified_base (13)..(13): 2' O-methyl modified a, c, u, g, or other
  modified_base (14)..(14): 2' O-methyl modified a, c, u, g, or other
  modified_base (15)..(15): 2' O-methyl modified a, c, u, g, or other
  modified_base (16)..(16): 2' O-methyl modified a, c, u, g, or other
  modified_base (17)..(17): 2' O-methyl modified a, c, u, g, or other
  modified_base (18)..(18): 2' O-methyl modified a, c, u, g, or other
  modified_base (19)..(19): 2' O-methyl modified a, c, u, g, or other
  misc_feature (19)..(20): Phosphorothioate linkage
  modified_base (20)..(20): 2' O-methyl modified a, c, u, g, or other
  misc_feature (20)..(21): Phosphorothioate linkage
  modified_base (21)..(21): 2' O-methyl modified a, c, u, g, or other
nnnnnnnnnnnnnnnnnnnnn

SEQ ID NO: 7613 - RNA, 21 nt, Artificial Sequence
  Description of Artificial Sequence: Synthetic oligonucleotide
  modified_base (1)..(1): 2' O-methyl modified a, c, u, g, or other
  modified_base (2)..(2): 2' O-methyl modified a, c, u, g, or other
  modified_base (3)..(3): 2' O-methyl modified a, c, u, g, or other
  modified_base (4)..(4): 2' O-methyl modified a, c, u, g, or other
  modified_base (5)..(5): 2' fluoro-modified a, c, u, g, or other
  modified_base (6)..(6): 2' O-methyl modified a, c, u, g, or other
  modified_base (7)..(7): 2' O-methyl modified a, c, u, g, or other
  modified_base (8)..(8): 2' fluoro-modified a, c, u, g, or other
  modified_base (9)..(9): 2' fluoro-modified a, c, u, g, or other
  modified_base (10)..(10): 2' O-methyl modified a, c, u, g, or other
  modified_base (11)..(11): 2' O-methyl modified a, c, u, g, or other
  modified_base (12)..(12): 2' O-methyl modified a, c, u, g, or other
  modified_base (13)..(13): 2' O-methyl modified a, c, u, g, or other
  modified_base (14)..(14): 2' O-methyl modified a, c, u, g, or other
  modified_base (15)..(15): 2' O-methyl modified a, c, u, g, or other
  modified_base (16)..(16): 2' O-methyl modified a, c, u, g, or other
  modified_base (17)..(17): 2' O-methyl modified a, c, u, g, or other
  modified_base (18)..(18): 2' O-methyl modified a, c, u, g, or other
  modified_base (19)..(19): 2' O-methyl modified a, c, u, g, or other
  misc_feature (19)..(20): Phosphorothioate linkage
  modified_base (20)..(20): 2' O-methyl modified a, c, u, g, or other
  misc_feature (20)..(21): Phosphorothioate linkage
  modified_base (21)..(21): 2' O-methyl modified a, c, u, g, or other
nnnnnnnnnnnnnnnnnnnnn

SEQ ID NO: 7614 - RNA, 21 nt, Artificial Sequence
  Description of Artificial Sequence: Synthetic oligonucleotide
  modified_base (1)..(1): 2' O-methyl modified a, c, u, g, or other
  modified_base (2)..(2): 2' O-methyl modified a, c, u, g, or other
  modified_base (3)..(3): 2' O-methyl modified a, c, u, g, or other
  modified_base (4)..(4): 2' O-methyl modified a, c, u, g, or other
  modified_base (5)..(5): 2' O-methyl modified a, c, u, g, or other
  modified_base (6)..(6): 2' fluoro-modified a, c, u, g, or other
  modified_base (7)..(7): 2' fluoro-modified a, c, u, g, or other
  modified_base (8)..(8): 2' fluoro-modified a, c, u, g, or other
  modified_base (9)..(9): 2' fluoro-modified a, c, u, g, or other
  modified_base (10)..(10): 2' fluoro-modified a, c, u, g, or other
  modified_base (11)..(11): 2' O-methyl modified a, c, u, g, or other
  modified_base (12)..(12): 2' O-methyl modified a, c, u, g, or other
  modified_base (13)..(13): 2' O-methyl modified a, c, u, g, or other
  modified_base (14)..(14): 2' O-methyl modified a, c, u, g, or other
  modified_base (15)..(15): 2' O-methyl modified a, c, u, g, or other
  modified_base (16)..(16): 2' O-methyl modified a, c, u, g, or other
  modified_base (17)..(17): 2' O-methyl modified a, c, u, g, or other
  modified_base (18)..(18): 2' O-methyl modified a, c, u, g, or other
  modified_base (19)..(19): 2' O-methyl modified a, c, u, g, or other
  misc_feature (19)..(20): Phosphorothioate linkage
  modified_base (20)..(20): 2' O-methyl modified a, c, u, g, or other
  misc_feature (20)..(21): Phosphorothioate linkage
  modified_base (21)..(21): 2' O-methyl modified a, c, u, g, or other
nnnnnnnnnnnnnnnnnnnnn

SEQ ID NO: 7615 - RNA, 21 nt, Artificial Sequence
  Description of Artificial Sequence: Synthetic oligonucleotide
  modified_base (1)..(1): 2' O-methyl modified a, c, u, g, or other
  modified_base (2)..(2): 2' O-methyl modified a, c, u, g, or other
  modified_base (3)..(3): 2' O-methyl modified a, c, u, g, or other
  modified_base (4)..(4): 2' O-methyl modified a, c, u, g, or other
  modified_base (5)..(5): 2' fluoro-modified a, c, u, g, or other
  modified_base (6)..(6): 2' fluoro-modified a, c, u, g, or other
  modified_base (7)..(7): 2' O-methyl modified a, c, u, g, or other
  modified_base (8)..(8): 2' O-methyl modified a, c, u, g, or other
  modified_base (9)..(9): 2' fluoro-modified a, c, u, g, or other
  modified_base (10)..(10): 2' O-methyl modified a, c, u, g, or other
  modified_base (11)..(11): 2' fluoro-modified a, c, u, g, or other
  modified_base (12)..(12): 2' O-methyl modified a, c, u, g, or other
  modified_base (13)..(13): 2' O-methyl modified a, c, u, g, or other
  modified_base (14)..(14): 2' O-methyl modified a, c, u, g, or other
  modified_base (15)..(15): 2' O-methyl modified a, c, u, g, or other
  modified_base (16)..(16): 2' O-methyl modified a, c, u, g, or other
  modified_base (17)..(17): 2' O-methyl modified a, c, u, g, or other
  modified_base (18)..(18): 2' O-methyl modified a, c, u, g, or other
  modified_base (19)..(19): 2' O-methyl modified a, c, u, g, or other
  misc_feature (19)..(20): Phosphorothioate linkage
  modified_base (20)..(20): 2' O-methyl modified a, c, u, g, or other
  misc_feature (20)..(21): Phosphorothioate linkage
  modified_base (21)..(21): 2' O-methyl modified a, c, u, g, or other
nnnnnnnnnnnnnnnnnnnnn

SEQ ID NO: 7616 - RNA, 21 nt, Artificial Sequence
  Description of Artificial Sequence: Synthetic oligonucleotide
  modified_base (1)..(1): 2' O-methyl modified a, c, u, g, or other
  modified_base (2)..(2): 2' O-methyl modified a, c, u, g, or other
  modified_base (3)..(3): 2' O-methyl modified a, c, u, g, or other
  modified_base (4)..(4): 2' O-methyl modified a, c, u, g, or other
  modified_base (5)..(5): 2' O-methyl modified a, c, u, g, or other
  modified_base (6)..(6): 2' fluoro-modified a, c, u, g, or other
  modified_base (7)..(7): 2' fluoro-modified a, c, u, g, or other
  modified_base (8)..(8): 2' O-methyl modified a, c, u, g, or other
  modified_base (9)..(9): 2' fluoro-modified a, c, u, g, or other
  modified_base (10)..(10): 2' O-methyl modified a, c, u, g, or other
  modified_base (11)..(11): 2' fluoro-modified a, c, u, g, or other
  modified_base (12)..(12): 2' O-methyl modified a, c, u, g, or other
  modified_base (13)..(13): 2' O-methyl modified a, c, u, g, or other
  modified_base (14)..(14): 2' O-methyl modified a, c, u, g, or other
  modified_base (15)..(15): 2' O-methyl modified a, c, u, g, or other
  modified_base (16)..(16): 2' O-methyl modified a, c, u, g, or other
  modified_base (17)..(17): 2' O-methyl modified a, c, u, g, or other
  modified_base (18)..(18): 2' O-methyl modified a, c, u, g, or other
  modified_base (19)..(19): 2' O-methyl modified a, c, u, g, or other
  misc_feature (19)..(20): Phosphorothioate linkage
  modified_base (20)..(20): 2' O-methyl modified a, c, u, g, or other
  misc_feature (20)..(21): Phosphorothioate linkage
  modified_base (21)..(21): 2' O-methyl modified a, c, u, g, or other
nnnnnnnnnnnnnnnnnnnnn

SEQ ID NO: 7617 - RNA, 21 nt, Artificial Sequence
  Description of Artificial Sequence: Synthetic oligonucleotide
  modified_base (1)..(1): 2' O-methyl modified a, c, u, g, or other
  modified_base (2)..(2): 2' O-methyl modified a, c, u, g, or other
  modified_base (3)..(3): 2' O-methyl modified a, c, u, g, or other
  modified_base (4)..(4): 2' O-methyl modified a, c, u, g, or other
  modified_base (5)..(5): 2' fluoro-modified a, c, u, g, or other
  modified_base (6)..(6): 2' O-methyl modified a, c, u, g, or other
  modified_base (7)..(7): 2' fluoro-modified a, c, u, g, or other
  modified_base (8)..(8): 2' O-methyl modified a, c, u, g, or other
  modified_base (9)..(9): 2' fluoro-modified a, c, u, g, or other
  modified_base (10)..(10): 2' O-methyl modified a, c, u, g, or other
  modified_base (11)..(11): 2' fluoro-modified a, c, u, g, or other
  modified_base (12)..(12): 2' O-methyl modified a, c, u, g, or other
  modified_base (13)..(13): 2' O-methyl modified a, c, u, g, or other
  modified_base (14)..(14): 2' O-methyl modified a, c, u, g, or other
  modified_base (15)..(15): 2' O-methyl modified a, c, u, g, or other
  modified_base (16)..(16): 2' O-methyl modified a, c, u, g, or other
  modified_base (17)..(17): 2' O-methyl modified a, c, u, g, or other
  modified_base (18)..(18): 2' O-methyl modified a, c, u, g, or other
  modified_base (19)..(19): 2' O-methyl modified a, c, u, g, or other
  misc_feature (19)..(20): Phosphorothioate linkage
  modified_base (20)..(20): 2' O-methyl modified a, c, u, g, or other
  misc_feature (20)..(21): Phosphorothioate linkage
  modified_base (21)..(21): 2' O-methyl modified a, c, u, g, or other
nnnnnnnnnnnnnnnnnnnnn

SEQ ID NO: 7618 - RNA, 21 nt, Artificial Sequence
  Description of Artificial Sequence: Synthetic oligonucleotide
  modified_base (1)..(1): 2' O-methyl modified a, c, u, g, or other
  modified_base (2)..(2): 2' O-methyl modified a, c, u, g, or other
  modified_base (3)..(3): 2' O-methyl modified a, c, u, g, or other
  modified_base (4)..(4): 2' O-methyl modified a, c, u, g, or other
  modified_base (5)..(5): 2' fluoro-modified a, c, u, g, or other
  modified_base (6)..(6): 2' O-methyl modified a, c, u, g, or other
  modified_base (7)..(7): 2' fluoro-modified a, c, u, g, or other
  modified_base (8)..(8): 2' O-methyl modified a, c, u, g, or other
  modified_base (9)..(9): 2' fluoro-modified a, c, u, g, or other
  modified_base (10)..(10): 2' fluoro-modified a, c, u, g, or other
  modified_base (11)..(11): 2' O-methyl modified a, c, u, g, or other
  modified_base (12)..(12): 2' O-methyl modified a, c, u, g, or other
  modified_base (13)..(13): 2' O-methyl modified a, c, u, g, or other
  modified_base (14)..(14): 2' O-methyl modified a, c, u, g, or other
  modified_base (15)..(15): 2' O-methyl modified a, c, u, g, or other
  modified_base (16)..(16): 2' O-methyl modified a, c, u, g, or other
  modified_base (17)..(17): 2' O-methyl modified a, c, u, g, or other
  modified_base (18)..(18): 2' O-methyl modified a, c, u, g, or other
  modified_base (19)..(19): 2' O-methyl modified a, c, u, g, or other
  misc_feature (19)..(20): Phosphorothioate linkage
  modified_base (20)..(20): 2' O-methyl modified a, c, u, g, or other
  misc_feature (20)..(21): Phosphorothioate linkage
  modified_base (21)..(21): 2' O-methyl modified a, c, u, g, or other
nnnnnnnnnnnnnnnnnnnnn

SEQ ID NO: 7619 - RNA, 21 nt, Artificial Sequence
  Description of Artificial Sequence: Synthetic oligonucleotide
  modified_base (1)..(1): 2' O-methyl modified a, c, u, g, or other
  modified_base (2)..(2): 2' O-methyl modified a, c, u, g, or other
  modified_base (3)..(3): 2' O-methyl modified a, c, u, g, or other
  modified_base (4)..(4): 2' O-methyl modified a, c, u, g, or other
  modified_base (5)..(5): 2' O-methyl modified a, c, u, g, or other
  modified_base (6)..(6): 2' O-methyl modified a, c, u, g, or other
  modified_base (7)..(7): 2' O-methyl modified a, c, u, g, or other
  modified_base (8)..(8): 2' O-methyl modified a, c, u, g, or other
  modified_base (9)..(9): 2' fluoro-modified a, c, u, g, or other
  modified_base (10)..(10): 2' O-methyl modified a, c, u, g, or other
  modified_base (11)..(11): 2' fluoro-modified a, c, u, g, or other
  modified_base (12)..(12): 2' O-methyl modified a, c, u, g, or other
  modified_base (13)..(13): 2' O-methyl modified a, c, u, g, or other
  modified_base (14)..(14): 2' O-methyl modified a, c, u, g, or other
  modified_base (15)..(15): 2' O-methyl modified a, c, u, g, or other
  modified_base (16)..(16): 2' O-methyl modified a, c, u, g, or other
  modified_base (17)..(17): 2' O-methyl modified a, c, u, g, or other
  modified_base (18)..(18): 2' O-methyl modified a, c, u, g, or other
  modified_base (19)..(19): 2' O-methyl modified a, c, u, g, or other
  misc_feature (19)..(20): Phosphorothioate linkage
  modified_base (20)..(20): 2' O-methyl modified a, c, u, g, or other
  misc_feature (20)..(21): Phosphorothioate linkage
  modified_base (21)..(21): 2' O-methyl modified a, c, u, g, or other
nnnnnnnnnnnnnnnnnnnnn

SEQ ID NO: 7620 - RNA, 21 nt, Artificial Sequence
  Description of Artificial Sequence: Synthetic oligonucleotide
  modified_base (1)..(1): 2' O-methyl modified a, c, u, g, or other
  modified_base (2)..(2): 2' O-methyl modified a, c, u, g, or other
  modified_base (3)..(3): 2' O-methyl modified a, c, u, g, or other
  modified_base (4)..(4): 2' O-methyl modified a, c, u, g, or other
  modified_base (5)..(5): 2' fluoro-modified a, c, u, g, or other
  modified_base (6)..(6): 2' O-methyl modified a, c, u, g, or other
  modified_base (7)..(7): 2' O-methyl modified a, c, u, g, or other
  modified_base (8)..(8): 2' fluoro-modified a, c, u, g, or other
  modified_base (9)..(9): 2' fluoro-modified a, c, u, g, or other
  modified_base (10)..(10): 2' O-methyl modified a, c, u, g, or other
  modified_base (11)..(11): 2' fluoro-modified a, c, u, g, or other
  modified_base (12)..(12): 2' O-methyl modified a, c, u, g, or other
  modified_base (13)..(13): 2' O-methyl modified a, c, u, g, or other
  modified_base (14)..(14): 2' O-methyl modified a, c, u, g, or other
  modified_base (15)..(15): 2' O-methyl modified a, c, u, g, or other
  modified_base (16)..(16): 2' O-methyl modified a, c, u, g, or other
  modified_base (17)..(17): 2' O-methyl modified a, c, u, g, or other
  modified_base (18)..(18): 2' O-methyl modified a, c, u, g, or other
  modified_base (19)..(19): 2' O-methyl modified a, c, u, g, or other
  misc_feature (19)..(20): Phosphorothioate linkage
  modified_base (20)..(20): 2' O-methyl modified a, c, u, g, or other
  misc_feature (20)..(21): Phosphorothioate linkage
  modified_base (21)..(21): 2' O-methyl modified a, c, u, g, or other
nnnnnnnnnnnnnnnnnnnnn

SEQ ID NO: 7621 - RNA, 21 nt, Artificial Sequence
  Description of Artificial Sequence: Synthetic oligonucleotide
  modified_base (1)..(1): 2' O-methyl modified a, c, u, g, or other
  modified_base (2)..(2): 2' O-methyl modified a, c, u, g, or other
  modified_base (3)..(3): 2' O-methyl modified a, c, u, g, or other
  modified_base (4)..(4): 2' O-methyl modified a, c, u, g, or other
  modified_base (5)..(5): 2' fluoro-modified a, c, u, g, or other
  modified_base (6)..(6): 2' O-methyl modified a, c, u, g, or other
  modified_base (7)..(7): 2' O-methyl modified a, c, u, g, or other
  modified_base (8)..(8): 2' O-methyl modified a, c, u, g, or other
  modified_base (9)..(9): 2' fluoro-modified a, c, u, g, or other
  modified_base (10)..(10): 2' O-methyl modified a, c, u, g, or other
  modified_base (11)..(11): 2' fluoro-modified a, c, u, g, or other
  modified_base (12)..(12): 2' O-methyl modified a, c, u, g, or other
  modified_base (13)..(13): 2' O-methyl modified a, c, u, g, or other
  modified_base (14)..(14): 2' O-methyl modified a, c, u, g, or other
  modified_base (15)..(15): 2' O-methyl modified a, c, u, g, or other
  modified_base (16)..(16): 2' O-methyl modified a, c, u, g, or other
  modified_base (17)..(17): 2' O-methyl modified a, c, u, g, or other
  modified_base (18)..(18): 2' O-methyl modified a, c, u, g, or other
  modified_base (19)..(19): 2' O-methyl modified a, c, u, g, or other
  misc_feature (19)..(20): Phosphorothioate linkage
  modified_base (20)..(20): 2' O-methyl modified a, c, u, g, or other
  misc_feature (20)..(21): Phosphorothioate linkage
  modified_base (21)..(21): 2' O-methyl modified a, c, u, g, or other
nnnnnnnnnnnnnnnnnnnnn

SEQ ID NO: 7622 - RNA, 21 nt, Artificial Sequence
  Description of Artificial Sequence: Synthetic oligonucleotide
  modified_base (1)..(1): 2' O-methyl modified a, c, u, g, or other
  modified_base (2)..(2): 2' O-methyl modified a, c, u, g, or other
  modified_base (3)..(3): 2' O-methyl modified a, c, u, g, or other
  modified_base (4)..(4): 2' O-methyl modified a, c, u, g, or other
  modified_base (5)..(5): 2' O-methyl modified a, c, u, g, or other
  modified_base (6)..(6): 2' fluoro-modified a, c, u, g, or other
  modified_base (7)..(7): 2' O-methyl modified a, c, u, g, or other
  modified_base (8)..(8): 2' fluoro-modified a, c, u, g, or other
  modified_base (9)..(9): 2' fluoro-modified a, c, u, g, or other
  modified_base (10)..(10): 2' O-methyl modified a, c, u, g, or other
  modified_base (11)..(11): 2' O-methyl modified a, c, u, g, or other
  modified_base (12)..(12): 2' O-methyl modified a, c, u, g, or other
  modified_base (13)..(13): 2' O-methyl modified a, c, u, g, or other
  modified_base (14)..(14): 2' O-methyl modified a, c, u, g, or other
  modified_base (15)..(15): 2' O-methyl modified a, c, u, g, or other
  modified_base (16)..(16): 2' O-methyl modified a, c, u, g, or other
  modified_base (17)..(17): 2' O-methyl modified a, c, u, g, or other
  modified_base (18)..(18): 2' O-methyl modified a, c, u, g, or other
  modified_base (19)..(19): 2' O-methyl modified a, c, u, g, or other
  misc_feature (19)..(20): Phosphorothioate linkage
  modified_base (20)..(20): 2' O-methyl modified a, c, u, g, or other
  misc_feature (20)..(21): Phosphorothioate linkage
  modified_base (21)..(21): 2' O-methyl modified a, c, u, g, or other
nnnnnnnnnnnnnnnnnnnnn

SEQ ID NO: 7623 - RNA, 21 nt, Artificial Sequence
  Description of Artificial Sequence: Synthetic oligonucleotide
  modified_base (1)..(1): 2' O-methyl modified a, c, u, g, or other
  modified_base (2)..(2): 2' O-methyl modified a, c, u, g, or other
  modified_base (3)..(3): 2' O-methyl modified a, c, u, g, or other
  modified_base (4)..(4): 2' O-methyl modified a, c, u, g, or other
  modified_base (5)..(5): 2' O-methyl modified a, c, u, g, or other
  modified_base (6)..(6): 2' O-methyl modified a, c, u, g, or other
  modified_base (7)..(7): 2' fluoro-modified a, c, u, g, or other
  modified_base (8)..(8): 2' O-methyl modified a, c, u, g, or other
  modified_base (9)..(9): 2' fluoro-modified a, c, u, g, or other
  modified_base (10)..(10): 2' O-methyl modified a, c, u, g, or other
  modified_base (11)..(11): 2' fluoro-modified a, c, u, g, or other
  modified_base (12)..(12): 2' O-methyl modified a, c, u, g, or other
  modified_base (13)..(13): 2' O-methyl modified a, c, u, g, or other
  modified_base (14)..(14): 2' O-methyl modified a, c, u, g, or other
  modified_base (15)..(15): 2' O-methyl modified a, c, u, g, or other
  modified_base (16)..(16): 2' O-methyl modified a, c, u, g, or other
  modified_base (17)..(17): 2' O-methyl modified a, c, u, g, or other
  modified_base (18)..(18): 2' O-methyl modified a, c, u, g, or other
  modified_base (19)..(19): 2' O-methyl modified a, c, u, g, or other
  misc_feature (19)..(20): Phosphorothioate linkage
  modified_base (20)..(20): 2' O-methyl modified a, c, u, g, or other
  misc_feature (20)..(21): Phosphorothioate linkage
  modified_base (21)..(21): 2' O-methyl modified a, c, u, g, or other
nnnnnnnnnnnnnnnnnnnnn

SEQ ID NO: 7624 - RNA, 21 nt, Artificial Sequence
  Description of Artificial Sequence: Synthetic oligonucleotide
  modified_base (1)..(1): 2' O-methyl modified a, c, u, g, or other
  modified_base (2)..(2): 2' O-methyl modified a, c, u, g, or other
  modified_base (3)..(3): 2' O-methyl modified a, c, u, g, or other
  modified_base (4)..(4): 2' O-methyl modified a, c, u, g, or other
  modified_base (5)..(5): 2' O-methyl modified a, c, u, g, or other
  modified_base (6)..(6): 2' fluoro-modified a, c, u, g, or other
  modified_base (7)..(7): 2' O-methyl modified a, c, u, g, or other
  modified_base (8)..(8): 2' fluoro-modified a, c, u, g, or other
  modified_base (9)..(9): 2' fluoro-modified a, c, u, g, or other
  modified_base (10)..(10): 2' O-methyl modified a, c, u, g, or other
  modified_base (11)..(11): 2' fluoro-modified a, c, u, g, or other
  modified_base (12)..(12): 2' O-methyl modified a, c, u, g, or other
  modified_base (13)..(13): 2' O-methyl modified a, c, u, g, or other
  modified_base (14)..(14): 2' O-methyl modified a, c, u, g, or other
  modified_base (15)..(15): 2' O-methyl modified a, c, u, g, or other
  modified_base (16)..(16): 2' O-methyl modified a, c, u, g, or other
  modified_base (17)..(17): 2' O-methyl modified a, c, u, g, or other
  modified_base (18)..(18): 2' O-methyl modified a, c, u, g, or other
  modified_base (19)..(19): 2' O-methyl modified a, c, u, g, or other
  misc_feature (19)..(20): Phosphorothioate linkage
  modified_base (20)..(20): 2' O-methyl modified a, c, u, g, or other
  misc_feature (20)..(21): Phosphorothioate linkage
  modified_base (21)..(21): 2' O-methyl modified a, c, u, g, or other
nnnnnnnnnnnnnnnnnnnnn

SEQ ID NO: 7625 - RNA, 21 nt, Artificial Sequence
  Description of Artificial Sequence: Synthetic oligonucleotide
  modified_base (1)..(1): 2' O-methyl modified a, c, u, g, or other
  modified_base (2)..(2): 2' O-methyl modified a, c, u, g, or other
  modified_base (3)..(3): 2' O-methyl modified a, c, u, g, or other
  modified_base (4)..(4): 2' O-methyl modified a, c, u, g, or other
  modified_base (5)..(5): 2' O-methyl modified a, c, u, g, or other
  modified_base (6)..(6): 2' O-methyl modified a, c, u, g, or other
  modified_base (7)..(7): 2' O-methyl modified a, c, u, g, or other
  modified_base (8)..(8): 2' O-methyl modified a, c, u, g, or other
  modified_base (9)..(9): 2' fluoro-modified a, c, u, g, or other
  modified_base (10)..(10): 2' O-methyl modified a, c, u, g, or other
  modified_base (11)..(11): 2' O-methyl modified a, c, u, g, or other
  modified_base (12)..(12): 2' O-methyl modified a, c, u, g, or other
  modified_base (13)..(13): 2' O-methyl modified a, c, u, g, or other
  modified_base (14)..(14): 2' O-methyl modified a, c, u, g, or other
  modified_base (15)..(15): 2' O-methyl modified a, c, u, g, or other
  modified_base (16)..(16): 2' O-methyl modified a, c, u, g, or other
  modified_base (17)..(17): 2' O-methyl modified a, c, u, g, or other
  modified_base (18)..(18): 2' O-methyl modified a, c, u, g, or other
  modified_base (19)..(19): 2' O-methyl modified a, c, u, g, or other
  misc_feature (19)..(20): Phosphorothioate linkage
  modified_base (20)..(20): 2' O-methyl modified a, c, u, g, or other
  misc_feature (20)..(21): Phosphorothioate linkage
  modified_base (21)..(21): 2' O-methyl modified a, c, u, g, or other
nnnnnnnnnnnnnnnnnnnnn

SEQ ID NO: 7626 - RNA, 21 nt, Artificial Sequence
  Description of Artificial Sequence: Synthetic oligonucleotide
  modified_base (1)..(1): 2' O-methyl modified a, c, u, g, or other
  modified_base (2)..(2): 2' O-methyl modified a, c, u, g, or other
  modified_base (3)..(3): 2' O-methyl modified a, c, u, g, or other
  modified_base (4)..(4): 2' O-methyl modified a, c, u, g, or other
  modified_base (5)..(5): 2' fluoro-modified a, c, u, g, or other
  modified_base (6)..(6): 2' O-methyl modified a, c, u, g, or other
  modified_base (7)..(7): 2' fluoro-modified a, c, u, g, or other
  modified_base (8)..(8): 2' O-methyl modified a, c, u, g, or other
  modified_base (9)..(9): 2' fluoro-modified a, c, u, g, or other
  modified_base (10)..(10): 2' O-methyl modified a, c, u, g, or other
  modified_base (11)..(11): 2' O-methyl modified a, c, u, g, or other
  modified_base (12)..(12): 2' O-methyl modified a, c, u, g, or other
  modified_base (13)..(13): 2' O-methyl modified a, c, u, g, or other
  modified_base (14)..(14): 2' O-methyl modified a, c, u, g, or other
  modified_base (15)..(15): 2' O-methyl modified a, c, u, g, or other
  modified_base (16)..(16): 2' O-methyl modified a, c, u, g, or other
  modified_base (17)..(17): 2' O-methyl modified a, c, u, g, or other
  modified_base (18)..(18): 2' O-methyl modified a, c, u, g, or other
  modified_base (19)..(19): 2' O-methyl modified a, c, u, g, or other
  misc_feature (19)..(20): Phosphorothioate linkage
  modified_base (20)..(20): 2' O-methyl modified a, c, u, g, or other
  misc_feature (20)..(21): Phosphorothioate linkage
  modified_base (21)..(21): 2' O-methyl modified a, c, u, g, or other
nnnnnnnnnnnnnnnnnnnnn

SEQ ID NO: 7627 - RNA, 21 nt, Artificial Sequence
  Description of Artificial Sequence: Synthetic oligonucleotide
  modified_base (1)..(1): 2' O-methyl modified a, c, u, g, or other
  modified_base (2)..(2): 2' O-methyl modified a, c, u, g, or other
  modified_base (3)..(3): 2' O-methyl modified a, c, u, g, or other
  modified_base (4)..(4): 2' O-methyl modified a, c, u, g, or other
  modified_base (5)..(5): 2' O-methyl modified a, c, u, g, or other
  modified_base (6)..(6): 2' fluoro-modified a, c, u, g, or other
  modified_base (7)..(7): 2' O-methyl modified a, c, u, g, or other
  modified_base (8)..(8): 2' O-methyl modified a, c, u, g, or other
  modified_base (9)..(9): 2' fluoro-modified a, c, u, g, or other
  modified_base (10)..(10): 2' fluoro-modified a, c, u, g, or other
  modified_base (11)..(11): 2' O-methyl modified a, c, u, g, or other
  modified_base (12)..(12): 2' O-methyl modified a, c, u, g, or other
  modified_base (13)..(13): 2' O-methyl modified a, c, u, g, or other
  modified_base (14)..(14): 2' O-methyl modified a, c, u, g, or other
  modified_base (15)..(15): 2' O-methyl modified a, c, u, g, or other
  modified_base (16)..(16): 2' O-methyl modified a, c, u, g, or other
  modified_base (17)..(17): 2' O-methyl modified a, c, u, g, or other
  modified_base (18)..(18): 2' O-methyl modified a, c, u, g, or other
  modified_base (19)..(19): 2' O-methyl modified a, c, u, g, or other
  misc_feature (19)..(20): Phosphorothioate linkage
  modified_base (20)..(20): 2' O-methyl modified a, c, u, g, or other
  misc_feature (20)..(21): Phosphorothioate linkage
  modified_base (21)..(21): 2' O-methyl modified a, c, u, g, or other
nnnnnnnnnnnnnnnnnnnnn

SEQ ID NO: 7628 - RNA, 21 nt, Artificial Sequence
  Description of Artificial Sequence: Synthetic oligonucleotide
  modified_base (1)..(1): 2' O-methyl modified a, c, u, g, or other
  modified_base (2)..(2): 2' O-methyl modified a, c, u, g, or other
  modified_base (3)..(3): 2' O-methyl modified a, c, u, g, or other
  modified_base (4)..(4): 2' O-methyl modified a, c, u, g, or other
  modified_base (5)..(5): 2' O-methyl modified a, c, u, g, or other
  modified_base (6)..(6): 2' fluoro-modified a, c, u, g, or other
  modified_base (7)..(7): 2' O-methyl modified a, c, u, g, or other
  modified_base (8)..(8): 2' O-methyl modified a, c, u, g, or other
  modified_base (9)..(9): 2' fluoro-modified a, c, u, g, or other
  modified_base (10)..(10): 2' O-methyl modified a, c, u, g, or other
  modified_base (11)..(11): 2' fluoro-modified a, c, u, g, or other
  modified_base (12)..(12): 2' O-methyl modified a, c, u, g, or other
  modified_base (13)..(13): 2' O-methyl modified a, c, u, g, or other
  modified_base (14)..(14): 2' O-methyl modified a, c, u, g, or other
  modified_base (15)..(15): 2' O-methyl modified a, c, u, g, or other
  modified_base (16)..(16): 2' O-methyl modified a, c, u, g, or other
  modified_base (17)..(17): 2' O-methyl modified a, c, u, g, or other
  modified_base (18)..(18): 2' O-methyl modified a, c, u, g, or other
  modified_base (19)..(19): 2' O-methyl modified a, c, u, g, or other
  misc_feature (19)..(20): Phosphorothioate linkage
  modified_base (20)..(20): 2' O-methyl modified a, c, u, g, or other
  misc_feature (20)..(21): Phosphorothioate linkage
  modified_base (21)..(21): 2' O-methyl modified a, c, u, g, or other
nnnnnnnnnnnnnnnnnnnnn

SEQ ID NO: 7629 - RNA, 21 nt, Artificial Sequence
  Description of Artificial Sequence: Synthetic oligonucleotide
  modified_base (1)..(1): 2' O-methyl modified a, c, u, g, or other
  modified_base (2)..(2): 2' O-methyl modified a, c, u, g, or other
  modified_base (3)..(3): 2' O-methyl modified a, c, u, g, or other
  modified_base (4)..(4): 2' O-methyl modified a, c, u, g, or other
  modified_base (5)..(5): 2' fluoro-modified a, c, u, g, or other
  modified_base (6)..(6): 2' fluoro-modified a, c, u, g, or other
  modified_base (7)..(7): 2' O-methyl modified a, c, u, g, or other
  modified_base (8)..(8): 2' O-methyl modified a, c, u, g, or other
  modified_base (9)..(9): 2' fluoro-modified a, c, u, g, or other
  modified_base (10)..(10): 2' O-methyl modified a, c, u, g, or other
  modified_base (11)..(11): 2' O-methyl modified a, c, u, g, or other
  modified_base (12)..(12): 2' O-methyl modified a, c, u, g, or other
  modified_base (13)..(13): 2' O-methyl modified a, c, u, g, or other
  modified_base (14)..(14): 2' O-methyl modified a, c, u, g, or other
  modified_base (15)..(15): 2' O-methyl modified a, c, u, g, or other
  modified_base (16)..(16): 2' O-methyl modified a, c, u, g, or other
  modified_base (17)..(17): 2' O-methyl modified a, c, u, g, or other
  modified_base (18)..(18): 2' O-methyl modified a, c, u, g, or other
  modified_base (19)..(19): 2' O-methyl modified a, c, u, g, or other
  misc_feature (19)..(20): Phosphorothioate linkage
  modified_base (20)..(20): 2' O-methyl modified a, c, u, g, or other
  misc_feature (20)..(21): Phosphorothioate linkage
  modified_base (21)..(21): 2' O-methyl modified a, c, u, g, or other
nnnnnnnnnnnnnnnnnnnnn

SEQ ID NO: 7630 - RNA, 21 nt, Artificial Sequence
  Description of Artificial Sequence: Synthetic oligonucleotide
  modified_base (1)..(1): 2' O-methyl modified a, c, u, g, or other
  modified_base (2)..(2): 2' O-methyl modified a, c, u, g, or other
  modified_base (3)..(3): 2' O-methyl modified a, c, u, g, or other
  modified_base (4)..(4): 2' O-methyl modified a, c, u, g, or other
  modified_base (5)..(5): 2' O-methyl modified a, c, u, g, or other
  modified_base (6)..(6): 2' fluoro-modified a, c, u, g, or other
  modified_base (7)..(7): 2' fluoro-modified a, c, u, g, or other
  modified_base (8)..(8): 2' O-methyl modified a, c, u, g, or other
  modified_base (9)..(9): 2' fluoro-modified a, c, u, g, or other
  modified_base (10)..(10): 2' O-methyl modified a, c, u, g, or other
  modified_base (11)..(11): 2' O-methyl modified a, c, u, g, or other
  modified_base (12)..(12): 2' O-methyl modified a, c, u, g, or other
  modified_base (13)..(13): 2' O-methyl modified a, c, u, g, or other
  modified_base (14)..(14): 2' O-methyl modified a, c, u, g, or other
  modified_base (15)..(15): 2' O-methyl modified a, c, u, g, or other
  modified_base (16)..(16): 2' O-methyl modified a, c, u, g, or other
  modified_base (17)..(17): 2' O-methyl modified a, c, u, g, or other
  modified_base (18)..(18): 2' O-methyl modified a, c, u, g, or other
  modified_base (19)..(19): 2' O-methyl modified a, c, u, g, or other
  misc_feature (19)..(20): Phosphorothioate linkage
  modified_base (20)..(20): 2' O-methyl modified a, c, u, g, or other
  misc_feature (20)..(21): Phosphorothioate linkage
  modified_base (21)..(21): 2' O-methyl modified a, c, u, g, or other
nnnnnnnnnnnnnnnnnnnnn

SEQ ID NO: 7631 - RNA, 21 nt, Artificial Sequence
  Description of Artificial Sequence: Synthetic oligonucleotide
  modified_base (1)..(1): 2' O-methyl modified a, c, u, g, or other
  modified_base (2)..(2): 2' O-methyl modified a, c, u, g, or other
  modified_base (3)..(3): 2' O-methyl modified a, c, u, g, or other
  modified_base (4)..(4): 2' O-methyl modified a, c, u, g, or other
  modified_base (5)..(5): 2' O-methyl modified a, c, u, g, or other
  modified_base (6)..(6): 2' fluoro-modified a, c, u, g, or other
  modified_base (7)..(7): 2' fluoro-modified a, c, u, g, or other
  modified_base (8)..(8): 2' O-methyl modified a, c, u, g, or other
  modified_base (9)..(9): 2' fluoro-modified a, c, u, g, or other
  modified_base (10)..(10): 2' fluoro-modified a, c, u, g, or other
  modified_base (11)..(11): 2' O-methyl modified a, c, u, g, or other
  modified_base (12)..(12): 2' O-methyl modified a, c, u, g, or other
  modified_base (13)..(13): 2' O-methyl modified a, c, u, g, or other
  modified_base (14)..(14): 2' O-methyl modified a, c, u, g, or other
  modified_base (15)..(15): 2' O-methyl modified a, c, u, g, or other
  modified_base (16)..(16): 2' O-methyl modified a, c, u, g, or other
  modified_base (17)..(17): 2' O-methyl modified a, c, u, g, or other
  modified_base (18)..(18): 2' O-methyl modified a, c, u, g, or other
  modified_base (19)..(19): 2' O-methyl modified a, c, u, g, or other
  misc_feature (19)..(20): Phosphorothioate linkage
  modified_base (20)..(20): 2' O-methyl modified a, c, u, g, or other
  misc_feature (20)..(21): Phosphorothioate linkage
  modified_base (21)..(21): 2' O-methyl modified a, c, u, g, or other
nnnnnnnnnnnnnnnnnnnnn

SEQ ID NO: 7632 - RNA, 21 nt, Artificial Sequence
  Description of Artificial Sequence: Synthetic oligonucleotide
  modified_base (1)..(1): 2' O-methyl modified a, c, u, g, or other
  modified_base (2)..(2): 2' O-methyl modified a, c, u, g, or other
  modified_base (3)..(3): 2' O-methyl modified a, c, u, g, or other
  modified_base (4)..(4): 2' O-methyl modified a, c, u, g, or other
  modified_base (5)..(5): 2' O-methyl modified a, c, u, g, or other
  modified_base (6)..(6): 2' O-methyl modified a, c, u, g, or other
  modified_base (7)..(7): 2' O-methyl modified a, c, u, g, or other
  modified_base (8)..(8): 2' fluoro-modified a, c, u, g, or other
  modified_base (9)..(9): 2' fluoro-modified a, c, u, g, or other
  modified_base (10)..(10): 2' fluoro-modified a, c, u, g, or other
  modified_base (11)..(11): 2' fluoro-modified a, c, u, g, or other
  modified_base (12)..(12): 2' O-methyl modified a, c, u, g, or other
  modified_base (13)..(13): 2' O-methyl modified a, c, u, g, or other
  modified_base (14)..(14): 2' O-methyl modified a, c, u, g, or other
  modified_base (15)..(15): 2' O-methyl modified a, c, u, g, or other
  modified_base (16)..(16): 2' O-methyl modified a, c, u, g, or other
  modified_base (17)..(17): 2' O-methyl modified a, c, u, g, or other
  modified_base (18)..(18): 2' O-methyl modified a, c, u, g, or other
  modified_base (19)..(19): 2' O-methyl modified a, c, u, g, or other
  misc_feature (19)..(20): Phosphorothioate linkage
  modified_base (20)..(20): 2' O-methyl modified a, c, u, g, or other
  misc_feature (20)..(21): Phosphorothioate linkage
  modified_base (21)..(21): 2' O-methyl modified a, c, u, g, or other
nnnnnnnnnnnnnnnnnnnnn

SEQ ID NO: 7633 - RNA, 21 nt, Artificial Sequence
  Description of Artificial Sequence: Synthetic oligonucleotide
  modified_base (1)..(1): 2' O-methyl modified a, c, u, g, or other
  modified_base (2)..(2): 2' O-methyl modified a, c, u, g, or other
  modified_base (3)..(3): 2' O-methyl modified a, c, u, g, or other
  modified_base (4)..(4): 2' O-methyl modified a, c, u, g, or other
  modified_base (5)..(5): 2' O-methyl modified a, c, u, g, or other
  modified_base (6)..(6): 2' O-methyl modified a, c, u, g, or other
  modified_base (7)..(7): 2' fluoro-modified a, c, u, g, or other
  modified_base (8)..(8): 2' fluoro-modified a, c, u, g, or other
  modified_base (9)..(9): 2' fluoro-modified a, c, u, g, or other
  modified_base (10)..(10): 2' fluoro-modified a, c, u, g, or other
  modified_base (11)..(11): 2' fluoro-modified a, c, u, g, or other
  modified_base (12)..(12): 2' O-methyl modified a, c, u, g, or other
  modified_base (13)..(13): 2' O-methyl modified a, c, u, g, or other
  modified_base (14)..(14): 2' O-methyl modified a, c, u, g, or other
  modified_base (15)..(15): 2' O-methyl modified a, c, u, g, or other
  modified_base (16)..(16): 2' O-methyl modified a, c, u, g, or other
  modified_base (17)..(17): 2' O-methyl modified a, c, u, g, or other
  modified_base (18)..(18): 2' O-methyl modified a, c, u, g, or other
  modified_base (19)..(19): 2' O-methyl modified a, c, u, g, or other
  misc_feature (19)..(20): Phosphorothioate linkage
  modified_base (20)..(20): 2' O-methyl modified a, c, u, g, or other
  misc_feature (20)..(21): Phosphorothioate linkage
  modified_base (21)..(21): 2' O-methyl modified a, c, u, g, or other
nnnnnnnnnnnnnnnnnnnnn

SEQ ID NO: 7634 - RNA, 21 nt, Artificial Sequence
  Description of Artificial Sequence: Synthetic oligonucleotide
  modified_base (1)..(1): 2' O-methyl modified a, c, u, g, or other
  modified_base (2)..(2): 2' O-methyl modified a, c, u, g, or other
  modified_base (3)..(3): 2' O-methyl modified a, c, u, g, or other
  modified_base (4)..(4): 2' O-methyl modified a, c, u, g, or other
  modified_base (5)..(5): 2' O-methyl modified a, c, u, g, or other
  modified_base (6)..(6): 2' fluoro-modified a, c, u, g, or other
  modified_base (7)..(7): 2' O-methyl modified a, c, u, g, or other
  modified_base (8)..(8): 2' fluoro-modified a, c, u, g, or other
  modified_base (9)..(9): 2' fluoro-modified a, c, u, g, or other
  modified_base (10)..(10): 2' fluoro-modified a, c, u, g, or other
  modified_base (11)..(11): 2' fluoro-modified a, c, u, g, or other
  modified_base (12)..(12): 2' O-methyl modified a, c, u, g, or other
  modified_base (13)..(13): 2' O-methyl modified a, c, u, g, or other
  modified_base (14)..(14): 2' O-methyl modified a, c, u, g, or other
  modified_base (15)..(15): 2' O-methyl modified a, c, u, g, or other
  modified_base (16)..(16): 2' O-methyl modified a, c, u, g, or other
  modified_base (17)..(17): 2' O-methyl modified a, c, u, g, or other
  modified_base (18)..(18): 2' O-methyl modified a, c, u, g, or other
  modified_base (19)..(19): 2' O-methyl modified a, c, u, g, or other
  misc_feature (19)..(20): Phosphorothioate linkage
  modified_base (20)..(20): 2' O-methyl modified a, c, u, g, or other
  misc_feature (20)..(21): Phosphorothioate linkage
  modified_base (21)..(21): 2' O-methyl modified a, c, u, g, or other
nnnnnnnnnnnnnnnnnnnnn

SEQ ID NO: 7635 - RNA, 21 nt, Artificial Sequence
  Description of Artificial Sequence: Synthetic oligonucleotide
  modified_base (1)..(1): 2' O-methyl modified a, c, u, g, or other
  modified_base (2)..(2): 2' O-methyl modified a, c, u, g, or other
  modified_base (3)..(3): 2' O-methyl modified a, c, u, g, or other
  modified_base (4)..(4): 2' O-methyl modified a, c, u, g, or other
  modified_base (5)..(5): 2' O-methyl modified a, c, u, g, or other
  modified_base (6)..(6): 2' fluoro-modified a, c, u, g, or other
  modified_base (7)..(7): 2' fluoro-modified a, c, u, g, or other
  modified_base (8)..(8): 2' fluoro-modified a, c, u, g, or other
  modified_base (9)..(9): 2' fluoro-modified a, c, u, g, or other
  modified_base (10)..(10): 2' O-methyl modified a, c, u, g, or other
  modified_base (11)..(11): 2' fluoro-modified a, c, u, g, or other
  modified_base (12)..(12): 2' O-methyl modified a, c, u, g, or other
  modified_base (13)..(13): 2' O-methyl modified a, c, u, g, or other
  modified_base (14)..(14): 2' O-methyl modified a, c, u, g, or other
  modified_base (15)..(15): 2' O-methyl modified a, c, u, g, or other
  modified_base (16)..(16): 2' O-methyl modified a, c, u, g, or other
  modified_base (17)..(17): 2' O-methyl modified a, c, u, g, or other
  modified_base (18)..(18): 2' O-methyl modified a, c, u, g, or other
  modified_base (19)..(19): 2' O-methyl modified a, c, u, g, or other
  misc_feature (19)..(20): Phosphorothioate linkage
  modified_base (20)..(20): 2' O-methyl modified a, c, u, g, or other
  misc_feature (20)..(21): Phosphorothioate linkage
  modified_base (21)..(21): 2' O-methyl modified a, c, u, g, or other
nnnnnnnnnnnnnnnnnnnnn

SEQ ID NO: 7636 - RNA, 21 nt, Artificial Sequence
  Description of Artificial Sequence: Synthetic oligonucleotide
  modified_base (1)..(1): 2' O-methyl modified a, c, u, g, or other
  modified_base (2)..(2): 2' O-methyl modified a, c, u, g, or other
  modified_base (3)..(3): 2' O-methyl modified a, c, u, g, or other
  modified_base (4)..(4): 2' O-methyl modified a, c, u, g, or other
  modified_base (5)..(5): 2' fluoro-modified a, c, u, g, or other
  modified_base (6)..(6): 2' O-methyl modified a, c, u, g, or other
  modified_base (7)..(7): 2' O-methyl modified a, c, u, g, or other
  modified_base (8)..(8): 2' fluoro-modified a, c, u, g, or other
  modified_base (9)..(9): 2' fluoro-modified a, c, u, g, or other
  modified_base (10)..(10): 2' fluoro-modified a, c, u, g, or other
  modified_base (11)..(11): 2' fluoro-modified a, c, u, g, or other
  modified_base (12)..(12): 2' O-methyl modified a, c, u, g, or other
  modified_base (13)..(13): 2' O-methyl modified a, c, u, g, or other
  modified_base (14)..(14): 2' O-methyl modified a, c, u, g, or other
  modified_base (15)..(15): 2' O-methyl modified a, c, u, g, or other
  modified_base (16)..(16): 2' O-methyl modified a, c, u, g, or other
  modified_base (17)..(17): 2' O-methyl modified a, c, u, g, or other
  modified_base (18)..(18): 2' O-methyl modified a, c, u, g, or other
  modified_base (19)..(19): 2' O-methyl modified a, c, u, g, or other
  misc_feature (19)..(20): Phosphorothioate linkage
  modified_base (20)..(20): 2' O-methyl modified a, c, u, g, or other
  misc_feature (20)..(21): Phosphorothioate linkage
  modified_base (21)..(21): 2' O-methyl modified a, c, u, g, or other
nnnnnnnnnnnnnnnnnnnnn

SEQ ID NO: 7637 - RNA, 21 nt, Artificial Sequence
  Description of Artificial Sequence: Synthetic oligonucleotide
  modified_base (1)..(1): 2' O-methyl modified a, c, u, g, or other
  modified_base (2)..(2): 2' O-methyl modified a, c, u, g, or other
  modified_base (3)..(3): 2' O-methyl modified a, c, u, g, or other
  modified_base (4)..(4): 2' O-methyl modified a, c, u, g, or other
  modified_base (5)..(5): 2' fluoro-modified a, c, u, g, or other
  modified_base (6)..(6): 2' O-methyl modified a, c, u, g, or other
  modified_base (7)..(7): 2' fluoro-modified a, c, u, g, or other
  modified_base (8)..(8): 2' fluoro-modified a, c, u, g, or other
  modified_base (9)..(9): 2' fluoro-modified a, c, u, g, or other
  modified_base (10)..(10): 2' fluoro-modified a, c, u, g, or other
  modified_base (11)..(11): 2' O-methyl modified a, c, u, g, or other
  modified_base (12)..(12): 2' O-methyl modified a, c, u, g, or other
  modified_base (13)..(13): 2' O-methyl modified a, c, u, g, or other
  modified_base (14)..(14): 2' O-methyl modified a, c, u, g, or other
  modified_base (15)..(15): 2' O-methyl modified a, c, u, g, or other
  modified_base (16)..(16): 2' O-methyl modified a, c, u, g, or other
  modified_base (17)..(17): 2' O-methyl modified a, c, u, g, or other
  modified_base (18)..(18): 2' O-methyl modified a, c, u, g, or other
  modified_base (19)..(19): 2' O-methyl modified a, c, u, g, or other
  misc_feature (19)..(20): Phosphorothioate linkage
  modified_base (20)..(20): 2' O-methyl modified a, c, u, g, or other
  misc_feature (20)..(21): Phosphorothioate linkage
  modified_base (21)..(21): 2' O-methyl modified a, c, u, g, or other
nnnnnnnnnnnnnnnnnnnnn

SEQ ID NO: 7638 - RNA, 21 nt, Artificial Sequence
  Description of Artificial Sequence: Synthetic oligonucleotide
  modified_base (1)..(1): 2' O-methyl modified a, c, u, g, or other
  modified_base (2)..(2): 2' O-methyl modified a, c, u, g, or other
  modified_base (3)..(3): 2' O-methyl modified a, c, u, g, or other
  modified_base (4)..(4): 2' O-methyl modified a, c, u, g, or other
  modified_base (5)..(5): 2' fluoro-modified a, c, u, g, or other
  modified_base (6)..(6): 2' fluoro-modified a, c, u, g, or other
  modified_base (7)..(7): 2' O-methyl modified a, c, u, g, or other
  modified_base (8)..(8): 2' fluoro-modified a, c, u, g, or other
  modified_base (9)..(9): 2' fluoro-modified a, c, u, g, or other
  modified_base (10)..(10): 2' O-methyl modified a, c, u, g, or other
  modified_base (11)..(11): 2' fluoro-modified a, c, u, g, or other
  modified_base (12)..(12): 2' O-methyl modified a, c, u, g, or other
  modified_base (13)..(13): 2' O-methyl modified a, c, u, g, or other
  modified_base (14)..(14): 2' O-methyl modified a, c, u, g, or other
  modified_base (15)..(15): 2' O-methyl modified a, c, u, g, or other
  modified_base (16)..(16): 2' O-methyl modified a, c, u, g, or other
  modified_base (17)..(17): 2' O-methyl modified a, c, u, g, or other
  modified_base (18)..(18): 2' O-methyl modified a, c, u, g, or other
  modified_base (19)..(19): 2' O-methyl modified a, c, u, g, or other
  misc_feature (19)..(20): Phosphorothioate linkage
  modified_base (20)..(20): 2' O-methyl modified a, c, u, g, or other
  misc_feature (20)..(21): Phosphorothioate linkage
  modified_base (21)..(21): 2' O-methyl modified a, c, u, g, or other
nnnnnnnnnnnnnnnnnnnnn

SEQ ID NO: 7639 - RNA, 21 nt, Artificial Sequence
  Description of Artificial Sequence: Synthetic oligonucleotide
  modified_base (1)..(1): 2' O-methyl modified a, c, u, g, or other
  modified_base (2)..(2): 2' O-methyl modified a, c, u, g, or other
  modified_base (3)..(3): 2' O-methyl modified a, c, u, g, or other
  modified_base (4)..(4): 2' O-methyl modified a, c, u, g, or other
  modified_base (5)..(5): 2' fluoro-modified a, c, u, g, or other
  modified_base (6)..(6): 2' fluoro-modified a, c, u, g, or other
  modified_base (7)..(7): 2' fluoro-modified a, c, u, g, or other
  modified_base (8)..(8): 2' fluoro-modified a, c, u, g, or other
  modified_base (9)..(9): 2' fluoro-modified a, c, u, g, or other
  modified_base (10)..(10): 2' O-methyl modified a, c, u, g, or other
  modified_base (11)..(11): 2' O-methyl modified a, c, u, g, or other
  modified_base (12)..(12): 2' O-methyl modified a, c, u, g, or other
  modified_base (13)..(13): 2' O-methyl modified a, c, u, g, or other
  modified_base (14)..(14): 2' O-methyl modified a, c, u, g, or other
  modified_base (15)..(15): 2' O-methyl modified a, c, u, g, or other
  modified_base (16)..(16): 2' O-methyl modified a, c, u, g, or other
  modified_base (17)..(17): 2' O-methyl modified a, c, u, g, or other
  modified_base (18)..(18): 2' O-methyl modified a, c, u, g, or other
  modified_base (19)..(19): 2' O-methyl modified a, c, u, g, or other
  misc_feature (19)..(20): Phosphorothioate linkage
  modified_base (20)..(20): 2' O-methyl modified a, c, u, g, or other
  misc_feature (20)..(21): Phosphorothioate linkage
  modified_base (21)..(21): 2' O-methyl modified a, c, u, g, or other
nnnnnnnnnnnnnnnnnnnnn

SEQ ID NO: 7640 - DNA, 21 bp, Artificial Sequence
  Description of Artificial Sequence: Synthetic oligonucleotide
  Description of Combined DNA/RNA Molecule: Synthetic oligonucleotide
  modified_base (1)..(1): 2' O-methyl modified a, c, u, g, or other
  modified_base (2)..(2): 2' O-methyl modified a, c, u, g, or other
  modified_base (3)..(3): 2' O-methyl modified a, c, u, g, or other
  modified_base (4)..(4): 2' O-methyl modified a, c, u, g, or other
  modified_base (5)..(5): 2' fluoro-modified a, c, u, g, or other
  modified_base (6)..(6): 2' O-methyl modified a, c, u, g, or other
  modified_base (7)..(7): 2' fluoro-modified a, c, u, g, or other
  modified_base (8)..(8): 2' fluoro-modified a, c, u, g, or other
  modified_base (9)..(9): 2' deoxy-modified a, c, u, g, or other
  modified_base (10)..(10): 2' O-methyl modified a, c, u, g, or other
  modified_base (11)..(11): 2' O-methyl modified a, c, u, g, or other
  modified_base (12)..(12): 2' O-methyl modified a, c, u, g, or other
  modified_base (13)..(13): 2' O-methyl modified a, c, u, g, or other
  modified_base (14)..(14): 2' O-methyl modified a, c, u, g, or other
  modified_base (15)..(15): 2' O-methyl modified a, c, u, g, or other
  modified_base (16)..(16): 2' O-methyl modified a, c, u, g, or other
  modified_base (17)..(17): 2' O-methyl modified a, c, u, g, or other
  modified_base (18)..(18): 2' O-methyl modified a, c, u, g, or other
  modified_base (19)..(19): 2' O-methyl modified a, c, u, g, or other
  misc_feature (19)..(20): Phosphorothioate linkage
  modified_base (20)..(20): 2' O-methyl modified a, c, u, g, or other
  misc_feature (20)..(21): Phosphorothioate linkage
  modified_base (21)..(21): 2' O-methyl modified a, c, u, g, or other
nnnnnnnnnnnnnnnnnnnnn

SEQ ID NO: 7641 - RNA, 21 nt, Artificial Sequence
  Description of Artificial Sequence: Synthetic oligonucleotide
  modified_base (1)..(1): 2' fluoro-modified a, c, u, g, or other
  misc_feature (1)..(2): Phosphorothioate linkage
  modified_base (2)..(2): 2' O-methyl modified a, c, u, g, or other
  misc_feature (2)..(3): Phosphorothioate linkage
  modified_base (3)..(3): 2' fluoro-modified a, c, u, g, or other
  modified_base (4)..(4): 2' O-methyl modified a, c, u, g, or other
  modified_base (5)..(5): 2' fluoro-modified a, c, u, g, or other
  modified_base (6)..(6): 2' O-methyl modified a, c, u, g, or other
  modified_base (7)..(7): 2' fluoro-modified a, c, u, g, or other
  modified_base (8)..(8): 2' O-methyl modified a, c, u, g, or other
  modified_base (9)..(9): 2' fluoro-modified a, c, u, g, or other
  modified_base (10)..(10): 2' O-methyl modified a, c, u, g, or other
  modified_base (11)..(11): 2' fluoro-modified a, c, u, g, or other
  modified_base (12)..(12): 2' O-methyl modified a, c, u, g, or other
  modified_base (13)..(13): 2' fluoro-modified a, c, u, g, or other
  modified_base (14)..(14): 2' O-methyl modified a, c, u, g, or other
  modified_base (15)..(15): 2' fluoro-modified a, c, u, g, or other
  modified_base (16)..(16): 2' O-methyl modified a, c, u, g, or other
  modified_base (17)..(17): 2' fluoro-modified a, c, u, g, or other
  modified_base (18)..(18): 2' O-methyl modified a, c, u, g, or other
  modified_base (19)..(19): 2' fluoro-modified a, c, u, g, or other
  misc_feature (19)..(20): Phosphorothioate linkage
  modified_base (20)..(20): 2' O-methyl modified a, c, u, g, or other
  misc_feature (20)..(21): Phosphorothioate linkage
  modified_base (21)..(21): 2' O-methyl modified a, c, u, g, or other
nnnnnnnnnnnnnnnnnnnnn

SEQ ID NO: 7642 - RNA, 21 nt, Artificial Sequence
  Description of Artificial Sequence: Synthetic oligonucleotide
  modified_base (1)..(1): 2' O-methyl modified a, c, u, g, or other
  misc_feature (1)..(2): Phosphorothioate linkage
  modified_base (2)..(2): 2' fluoro-modified a, c, u, g, or other
  misc_feature (2)..(3): Phosphorothioate linkage
  modified_base (3)..(3): 2' O-methyl modified a, c, u, g, or other
  modified_base (4)..(4): 2' fluoro-modified a, c, u, g, or other
  modified_base (5)..(5): 2' O-methyl modified a, c, u, g, or other
  modified_base (6)..(6): 2' fluoro-modified a, c, u, g, or other
  modified_base (7)..(7): 2' O-methyl modified a, c, u, g, or other
  modified_base (8)..(8): 2' fluoro-modified a, c, u, g, or other
  modified_base (9)..(9): 2' O-methyl modified a, c, u, g, or other
  modified_base (10)..(10): 2' fluoro-modified a, c, u, g, or other
  modified_base (11)..(11): 2' O-methyl modified a, c, u, g, or other
  modified_base (12)..(12): 2' O-methyl modified a, c, u, g, or other
  modified_base (13)..(13): 2' O-methyl modified a, c, u, g, or other
  modified_base (14)..(14): 2' fluoro-modified a, c, u, g, or other
  modified_base (15)..(15): 2' O-methyl modified a, c, u, g, or other
  modified_base (16)..(16): 2' fluoro-modified a, c, u, g, or other
  modified_base (17)..(17): 2' O-methyl modified a, c, u, g, or other
  modified_base (18)..(18): 2' fluoro-modified a, c, u, g, or other
  modified_base (19)..(19): 2' O-methyl modified a, c, u, g, or other
  misc_feature (19)..(20): Phosphorothioate linkage
  modified_base (20)..(20): 2' O-methyl modified a, c, u, g, or other
  misc_feature (20)..(21): Phosphorothioate linkage
  modified_base (21)..(21): 2' O-methyl modified a, c, u, g, or other
nnnnnnnnnnnnnnnnnnnnn

SEQ ID NO: 7643 - RNA, 21 nt, Artificial Sequence
  Description of Artificial Sequence: Synthetic oligonucleotide
  modified_base (1)..(1): 2' O-methyl modified a, c, u, g, or other
  misc_feature (1)..(2): Phosphorothioate linkage
  modified_base (2)..(2): 2' fluoro-modified a, c, u, g, or other
  misc_feature (2)..(3): Phosphorothioate linkage
  modified_base (3)..(3): 2' O-methyl modified a, c, u, g, or other
  modified_base (4)..(4): 2' O-methyl modified a, c, u, g, or other
  modified_base (5)..(5): 2' O-methyl modified a, c, u, g, or other
  modified_base (6)..(6): 2' fluoro-modified a, c, u, g, or other
  modified_base (7)..(7): 2' O-methyl modified a, c, u, g, or other
  modified_base (8)..(8): 2' fluoro-modified a, c, u, g, or other
  modified_base (9)..(9): 2' fluoro-modified a, c, u, g, or other
  modified_base (10)..(10): 2' O-methyl modified a, c, u, g, or other
  modified_base (11)..(11): 2' O-methyl modified a, c, u, g, or other
  modified_base (12)..(12): 2' O-methyl modified a, c, u, g, or other
  modified_base (13)..(13): 2' O-methyl modified a, c, u, g, or other
  modified_base (14)..(14): 2' fluoro-modified a, c, u, g, or other
  modified_base (15)..(15): 2' O-methyl modified a, c, u, g, or other
  modified_base (16)..(16): 2' fluoro-modified a, c, u, g, or other
  modified_base (17)..(17): 2' O-methyl modified a, c, u, g, or other
  modified_base (18)..(18): 2' O-methyl modified a, c, u, g, or other
  modified_base (19)..(19): 2' O-methyl modified a, c, u, g, or other
  misc_feature (19)..(20): Phosphorothioate linkage
  modified_base (20)..(20): 2' O-methyl modified a, c, u, g, or other
  misc_feature (20)..(21): Phosphorothioate linkage
  modified_base (21)..(21): 2' O-methyl modified a, c, u, g, or other
nnnnnnnnnnnnnnnnnnnnn

SEQ ID NO: 7644 - RNA, 21 nt, Artificial Sequence
  Description of Artificial Sequence: Synthetic oligonucleotide
  modified_base (1)..(1): 2' O-methyl modified a, c, u, g, or other
  misc_feature (1)..(2): Phosphorothioate linkage
  modified_base (2)..(2): 2' fluoro-modified a, c, u, g, or other
  misc_feature (2)..(3): Phosphorothioate linkage
  modified_base (3)..(3): 2' O-methyl modified a, c, u, g, or other
  modified_base (4)..(4): 2' O-methyl modified a, c, u, g, or other
  modified_base (5)..(5): 2' O-methyl modified a, c, u, g, or other
  modified_base (6)..(6): 2' fluoro-modified a, c, u, g, or other
  modified_base (7)..(7): 2' O-methyl modified a, c, u, g, or other
  modified_base (8)..(8): 2' O-methyl modified a, c, u, g, or other
  modified_base (9)..(9): 2' O-methyl modified a, c, u, g, or other
  modified_base (10)..(10): 2' O-methyl modified a, c, u, g, or other
  modified_base (11)..(11): 2' O-methyl modified a, c, u, g, or other
  modified_base (12)..(12): 2' O-methyl modified a, c, u, g, or other
  modified_base (13)..(13): 2' O-methyl modified a, c, u, g, or other
  modified_base (14)..(14): 2' fluoro-modified a, c, u, g, or other
  modified_base (15)..(15): 2' O-methyl modified a, c, u, g, or other
  modified_base (16)..(16): 2' fluoro-modified a, c, u, g, or other
  modified_base (17)..(17): 2' O-methyl modified a, c, u, g, or other
  modified_base (18)..(18): 2' O-methyl modified a, c, u, g, or other
  modified_base (19)..(19): 2' O-methyl modified a, c, u, g, or other
  misc_feature (19)..(20): Phosphorothioate linkage
  modified_base (20)..(20): 2' O-methyl modified a, c, u, g, or other
  misc_feature (20)..(21): Phosphorothioate linkage
  modified_base (21)..(21): 2' O-methyl modified a, c, u, g, or other
nnnnnnnnnnnnnnnnnnnnn

SEQ ID NO: 7645 - RNA, 21 nt, Artificial Sequence
  Description of Artificial Sequence: Synthetic oligonucleotide
  modified_base (1)..(1): 2' O-methyl modified a, c, u, g, or other
  misc_feature (1)..(2): Phosphorothioate linkage
  modified_base (2)..(2): 2' fluoro-modified a, c, u, g, or other
  misc_feature (2)..(3): Phosphorothioate linkage
  modified_base (3)..(3): 2' O-methyl modified a, c, u, g, or other
  modified_base (4)..(4): 2' fluoro-modified a, c, u, g, or other
  modified_base (5)..(5): 2' O-methyl modified a, c, u, g, or other
  modified_base (6)..(6): 2' fluoro-modified a, c, u, g, or other
  modified_base (7)..(7): 2' O-methyl modified a, c, u, g, or other
  modified_base (8)..(8): 2' O-methyl modified a, c, u, g, or other
  modified_base (9)..(9): 2' O-methyl modified a, c, u, g, or other
  modified_base (10)..(10): 2' O-methyl modified a, c, u, g, or other
  modified_base (11)..(11): 2' O-methyl modified a, c, u, g, or other
  modified_base (12)..(12): 2' O-methyl modified a, c, u, g, or other
  modified_base (13)..(13): 2' O-methyl modified a, c, u, g, or other
  modified_base (14)..(14): 2' fluoro-modified a, c, u, g, or other
  modified_base (15)..(15): 2' O-methyl modified a, c, u, g, or other
  modified_base (16)..(16): 2' fluoro-modified a, c, u, g, or other
  modified_base (17)..(17): 2' O-methyl modified a, c, u, g, or other
  modified_base (18)..(18): 2' O-methyl modified a, c, u, g, or other
  modified_base (19)..(19): 2' O-methyl modified a, c, u, g, or other
  misc_feature (19)..(20): Phosphorothioate linkage
  modified_base (20)..(20): 2' O-methyl modified a, c, u, g, or other
  misc_feature (20)..(21): Phosphorothioate linkage
  modified_base (21)..(21): 2' O-methyl modified a, c, u, g, or other
nnnnnnnnnnnnnnnnnnnnn

SEQ ID NO: 7646 - RNA, 21 nt, Artificial Sequence
  Description of Artificial Sequence: Synthetic oligonucleotide
  modified_base (1)..(1): 2' O-methyl modified a, c, u, g, or other
  misc_feature (1)..(2): Phosphorothioate linkage
  modified_base (2)..(2): 2' fluoro-modified a, c, u, g, or other
  misc_feature (2)..(3): Phosphorothioate linkage
  modified_base (3)..(3): 2' O-methyl modified a, c, u, g, or other
  modified_base (4)..(4): 2' fluoro-modified a, c, u, g, or other
  modified_base (5)..(5): 2' O-methyl modified a, c, u, g, or other
  modified_base (6)..(6): 2' fluoro-modified a, c, u, g, or other
  modified_base (7)..(7): 2' O-methyl modified a, c, u, g, or other
  modified_base (8)..(8): 2' fluoro-modified a, c, u, g, or other
  modified_base (9)..(9): 2' O-methyl modified a, c, u, g, or other
  modified_base (10)..(10): 2' fluoro-modified a, c, u, g, or other
  modified_base (11)..(11): 2' O-methyl modified a, c, u, g, or other
  modified_base (12)..(12): 2' fluoro-modified a, c, u, g, or other
  modified_base (13)..(13): 2' O-methyl modified a, c, u, g, or other
  modified_base (14)..(14): 2' fluoro-modified a, c, u, g, or other
  modified_base (15)..(15): 2' O-methyl modified a, c, u, g, or other
  modified_base (16)..(16): 2' fluoro-modified a, c, u, g, or other
  modified_base (17)..(17): 2' O-methyl modified a, c, u, g, or other
  modified_base (18)..(18): 2' fluoro-modified a, c, u, g, or other
  modified_base (19)..(19): 2' O-methyl modified a, c, u, g, or other
  misc_feature (19)..(20): Phosphorothioate linkage
  modified_base (20)..(20): 2' O-methyl modified a, c, u, g, or other
  misc_feature (20)..(21): Phosphorothioate linkage
  modified_base (21)..(21): 2' O-methyl modified a, c, u, g, or other
nnnnnnnnnnnnnnnnnnnnn

SEQ ID NO: 7647 - DNA, 20 bp, Artificial Sequence
  Description of Artificial Sequence: Synthetic oligonucleotide
  Description of Combined DNA/RNA Molecule: Synthetic oligonucleotide
  modified_base (1)..(1): 2' O-methyl modified a, c, u, g, or other
  misc_feature (1)..(2): Phosphorothioate linkage
  modified_base (2)..(2): 2' O-methyl modified a, c, u, g, or other
  misc_feature (2)..(3): Phosphorothioate linkage
  modified_base (3)..(3): 2' O-methyl modified a, c, u, g, or other
  misc_feature (3)..(4): Phosphorothioate linkage
  modified_base (4)..(4): 2' O-methyl modified a, c, u, g, or other
  misc_feature (4)..(5): Phosphorothioate linkage
  modified_base (5)..(5): 2' O-methyl modified a, c, u, g, or other
  misc_feature (5)..(6): Phosphorothioate linkage
  modified_base (6)..(6): 2' deoxy-modified a, c, u, g, or other
  misc_feature (6)..(7): Phosphorothioate linkage
  modified_base (7)..(7): 2' deoxy-modified a, c, u, g, or other
  misc_feature (7)..(8): Phosphorothioate linkage
  modified_base (8)..(8): 2' deoxy-modified a, c, u, g, or other
  misc_feature (8)..(9): Phosphorothioate linkage
  modified_base (9)..(9): 2' deoxy-modified a, c, u, g, or other
  misc_feature (9)..(10): Phosphorothioate linkage
  modified_base (10)..(10): 2' deoxy-modified a, c, u, g, or other
  misc_feature (10)..(11): Phosphorothioate linkage
  modified_base (11)..(11): 2' deoxy-modified a, c, u, g, or other
  misc_feature (11)..(12): Phosphorothioate linkage
  modified_base (12)..(12): 2' deoxy-modified a, c, u, g, or other
  misc_feature (12)..(13): Phosphorothioate linkage
  modified_base (13)..(13): 2' deoxy-modified a, c, u, g, or other
  misc_feature (13)..(14): Phosphorothioate linkage
  modified_base (14)..(14): 2' deoxy-modified a, c, u, g, or other
  misc_feature (14)..(15): Phosphorothioate linkage
  modified_base (15)..(15): 2' deoxy-modified a, c, u, g, or other
  misc_feature (15)..(16): Phosphorothioate linkage
  modified_base (16)..(16): 2' O-methyl modified a, c, u, g, or other
  misc_feature (16)..(17): Phosphorothioate linkage
  modified_base (17)..(17): 2' O-methyl modified a, c, u, g, or other
  misc_feature (17)..(18): Phosphorothioate linkage
  modified_base (18)..(18): 2' O-methyl modified a, c, u, g, or other
  misc_feature (18)..(19): Phosphorothioate linkage
  modified_base (19)..(19): 2' O-methyl modified a, c, u, g, or other
  misc_feature (19)..(20): Phosphorothioate linkage
  modified_base (20)..(20): 2' O-methyl modified a, c, u, g, or other
nnnnnnnnnnnnnnnnnnnn

What is claimed is:

1. A composition comprising an oligonucleotide that targets DKK2 and when administered to a subject in an effective amount increases a hair count in the subject.

2. The composition of claim 1, wherein the hair count is increased by about 10% or more, as compared to prior to administration.

3. The composition of claim 1, wherein the hair count includes a vellus hair count, a non-vellus hair count, or a total hair count.

4. A composition comprising an oligonucleotide that targets DKK2 and when administered to a subject in an effective amount increases a hair thickness measurement in the subject.

5. The composition of claim 4, wherein the hair thickness measurement is increased by about 10% or more, as compared to prior to administration.

6. A composition comprising an oligonucleotide that targets DKK2 and when administered to a subject in an effective amount increases a hair density measurement in the subject.

7. The composition of claim 6, wherein the hair density measurement is increased by about 10% or more, as compared to prior to administration.

8. A composition comprising an oligonucleotide that targets DKK2 and when administered to a subject in an effective amount increases a number of hair follicles in the subject.

9. The composition of claim 8, wherein the number of hair follicles is increased by about 10% or more, as compared to prior to administration.

10. The composition of claim 8, wherein the number of hair follicles includes a number of terminal hair follicles, a number of anagen hair follicles, a number of telogen hair follicles, a number of catagen hair follicles, a number of vellus-like miniaturized hair follicles, a number of indeterminate hair follicles, or a total number of hair follicles.

11. A composition comprising an oligonucleotide that targets DKK2 and when administered to a subject in an effective amount changes a hair loss assessment score in the subject.

12. The composition of claim 11, wherein the hair loss assessment score is changed by about 10% or more, as compared to prior to administration.

13. A composition comprising an oligonucleotide that targets DKK2 and when administered to a subject in an effective amount changes a protein or mRNA level of β-catenin, α-SMA, collagen I, or collagen III, in the subject.

14. The composition of claim 13, wherein the protein or mRNA level of β-catenin, α-SMA, collagen I, or collagen III is changed by about 10% or more, as compared to prior to administration.

15. A composition comprising an oligonucleotide that targets DKK2 and when administered to the skin of a subject in an effective amount decreases a level of DKK2 mRNA or DKK2 protein.

16. The composition of claim 15, wherein the skin comprises scalp skin.

17. The composition of claim 15, wherein the level of DKK2 mRNA or DKK2 protein decreased by about 10% or more, as compared to prior to administration.

18. The composition of any one of claims 1-17, wherein the oligonucleotide comprises a modified internucleoside linkage.

19. The composition of claim 18, wherein the modified internucleoside linkage comprises alkylphosphonate, phosphorothioate, methylphosphonate, phosphorodithioate, alkylphosphonothioate, phosphoramidate, carbamate, carbonate, phosphate triester, acetamidate, or carboxymethyl ester, or a combination thereof.

20. The composition of claim 18, wherein the modified internucleoside linkage comprises one or more phosphorothioate linkages.

21. The composition of any one of claims 1-17, wherein the oligonucleotide comprises 1, 2, 3, 4, 5, 6, 7, 8, 9, 10, 11, 12, 13, 14, 15, 16, 17, 18, 19, or 20 modified internucleoside linkages.

22. The composition of any one of claims 1-17, wherein the oligonucleotide comprises 2 or more modified internucleoside linkages, 3 or more modified internucleoside linkages, 4 or more modified internucleoside linkages, 5 or more modified internucleoside linkages, 6 or more modified internucleoside linkages, 7 or more modified internucleoside linkages, 8 or more modified internucleoside linkages, 9 or more modified internucleoside linkages, 10 or more modified internucleoside linkages, 11 or more modified internucleoside linkages, 12 or more modified internucleoside linkages, 13 or more modified internucleoside linkages, 14 or more modified internucleoside linkages, 15 or more modified internucleoside linkages, 16 or more modified internucleoside linkages, 17 or more modified internucleoside linkages, 18 or more modified internucleoside linkages, 19 or more modified internucleoside linkages, or 20 or more modified internucleoside linkages.

23. The composition of any one of claims 1-17, wherein the oligonucleotide comprises a modified nucleoside.

24. The composition of claim 23, wherein the modified nucleoside comprises a locked nucleic acid (LNA), hexitol nucleic acid (HLA), cyclohexene nucleic acid (CeNA), 2′-methoxyethyl, 2′-O-alkyl, 2′-O-allyl, 2′-O-allyl, 2′-fluoro, or 2′-deoxy, or a combination thereof.

25. The composition of claim 23, wherein the modified nucleoside comprises a LNA.

26. The composition of claim 23, wherein the modified nucleoside comprises a 2′,4′ constrained ethyl nucleic acid.

27. The composition of claim 23, wherein the modified nucleoside comprises a 2′-O-methyl nucleoside, 2′-deoxyfluoro nucleoside, 2′-O—N-methylacetamido (2′-O-NMA) nucleoside, a 2′-O-dimethylaminoethoxyethyl (2′-O-DMAEOE) nucleoside, 2′-O-aminopropyl (2′-O-AP) nucleoside, or 2′-ara-F, or a combination thereof.

28. The composition of claim 23, wherein the modified nucleoside comprises one or more 2′fluoro modified nucleosides.

29. The composition of claim 23, wherein the modified nucleoside comprises a 2′ O-alkyl modified nucleoside.

30. The composition of claim 23, wherein the oligonucleotide comprises a lipid attached at a 3′ or 5′ terminus of the oligonucleotide.

31. The composition of claim 30, wherein the lipid comprises cholesterol, myristoyl, palmitoyl, stearoyl, lithocholoyl, docosanoyl, docosahexaenoyl, myristyl, palmityl, stearyl, or α-tocopherol, or a combination thereof.

32. The composition of any one of claims 1-17, wherein the oligonucleotide comprises 1, 2, 3, 4, 5, 6, 7, 8, 9, 10, 11, 12, 13, 14, 15, 16, 17, 18, 19, 20, or 21 modified nucleosides.

33. The composition of any one of claims 1-17, wherein the oligonucleotide comprises 2 or more modified nucleosides, 3 or more modified nucleosides, 4 or more modified nucleosides, 5 or more modified nucleosides, 6 or more modified nucleosides, 7 or more modified nucleosides, 8 or more modified nucleosides, 9 or more modified nucleosides, 10 or more modified nucleosides, 11 or more modified nucleosides, 12 or more modified nucleosides, 13 or more modified nucleosides, 14 or more modified nucleosides, 15 or more modified nucleosides, 16 or more modified nucleosides, 17 or more modified nucleosides, 18 or more modified nucleosides, 19 or more modified nucleosides, 20 or more modified nucleosides, or 21 or more modified nucleosides.

34. The composition of any one of claims 1-17, wherein the oligonucleotide comprises a small interfering RNA (siRNA) comprising a sense strand and an antisense strand.

35. The composition of claim 34, wherein the sense strand is 14-30 nucleosides in length.

36. The composition of claim 34, wherein the antisense strand is 14-30 nucleosides in length.

37. A composition comprising an oligonucleotide that inhibits the expression of DKK2 wherein the oligonucleotide comprises an siRNA comprising a sense strand and an antisense strand, each strand is independently about 14-30 nucleosides in length, and at least one of the sense strand and the antisense strand comprises a nucleoside sequence comprising about 14-30 contiguous nucleosides of SEQ ID NO: 1.

38. A composition comprising an oligonucleotide that inhibits the expression of DKK2, wherein the oligonucleotide comprises an siRNA comprising a sense strand and an antisense strand, each strand is independently about 14-30 nucleosides in length, and at least one of the sense strand and the antisense strand comprises a nucleoside sequence comprising about 14-30 contiguous nucleosides of a full-length human DKK2 pre-mRNA sequence.

39. A method of treating hair loss in a subject in need thereof comprising administering to the subject a composition according to any one of claims 1-17.

40. The method of claim 39, wherein the hair loss comprises any one or more of male pattern baldness, female pattern baldness, alopecia areata, or non-scarring hair loss.

41. The method of claim 39, wherein the administration is topical.
